(19) United States
(12) Patent Application Publication
(10) Pub. No.: US 2025/0257355 A1
(43) Pub. Date: Aug. 14, 2025

(54) Antisense oligonucleotides for treatment of USHER 2A. Exons 30-31

(71) Applicant: Stichting Radbound Universitair Medisch Centrum, Nijmegen (NL)

(72) Inventor: Hendrikus Antonius Rudolfus van Wyk, Nijmegen (NL)

(73) Assignee: Stichting Radbound Universitair Medisch Centrum, Nijmegen (NL)

(21) Appl. No.: 19/116,416

(22) PCT Filed: Oct. 6, 2023
(86) PCT No.: PCT/EP2023/077672

§ 371 Date: Mar. 28, 2025

(30) Foreign Application Priority Data
Oct. 6, 2022 (EP) 22200115.8

(51) Int. Cl. C12N 15/113; A61P 27/02

(52) U.S. Cl. CPC C12N 15/113; A61P 27/02; C12N 2310/11; C12N 2310/315; C12N 2310/321; C12N 2320/33; C12N 2320/35

(57) ABSTRACT

The invention relates to the fields of medicine and immunology. In particular, it relates to novel antisense oligonucleotides that may be used in the treatment, prevention and/or delay of an USH2A related disease or condition.

### FIELD OF THE INVENTION

[0001] The invention relates to the fields of medicine and immunology. In particular, it relates to novel antisense oligonucleotides that may be used in the treatment, prevention and/or delay of conditions associated with USH2A.

### BACKGROUND OF THE INVENTION

[0002] Retinitis pigmentosa (RP) is a genetically and clinically heterogeneous condition that is currently still largely untreatable. Patients usually present with a progressive loss of visual function that initially manifests with night blindness and visual field constriction during adolescence, and progresses towards the loss of central vision and ultimately legal blindness in later stages of life. With a predicted overall prevalence of 1 in 4,000 individuals, RP is estimated to affect almost two million individuals worldwide. Mutations in USH2A are the most frequent cause of RP with an autosomal recessive mode of inheritance (arRP), accounting for up to 23% of all arRP cases. Besides non-syndromic RP, mutations in USH2A can also result in Usher syndrome. Patients suffering from Usher syndrome experience a double sensory impairment (combination of RP and congenital hearing impairment) making the development of a therapy to halt or delay their progressive vision loss even more urgent. The delayed onset and slowly progressive nature of USH2A-associated RP, and the nowadays often early genetic diagnosis of Usher syndrome resulting from genetic testing after the observation of congenital hearing impairment, provides ample time for therapeutic intervention.

[0003] USH2A, located on chromosome 1q41, spans approximately 800 kb and encodes two different isoforms of the usherin protein. The large usherin isoform consists of 5202 amino acids and is encoded by 72 exons. This isoform is predominantly expressed in photoreceptor cells of the retina and hair cells of the cochlea. The short isoform consists of 1546 amino acids encoded by a transcript that is built up by the 5′ 21 exons, and is expressed more widely. In total, over 600 different mutations have been identified in the transcript encoding the large isoform of usherin. As these mutations are mostly private and distributed all over the gene, the development of a mutation-independent therapy is preferred to eventually treat a significant group of patients (USH2A¬LOVD mutation database, https://databases.lovd.nl/shared/variants/USH2A/unique).

[0004] The size of the usherin-encoding sequence (15.6 kb) severely hampers the development of conventional gene augmentation therapy. The protein-encoding sequence by far exceeds the packaging capacity of adeno-associated virus (AAV) vectors (4.7 kb) and lentiviral vectors (8 kb), which are the currently preferred vehicles for retinal gene delivery. This makes conventional AAV- and LV-mediated gene augmentation therapy for USH2A-associated RP very challenging. An attractive alternative approach is antisense oligonucleotide (ASO)-induced splice modulation. In this approach, ASOs are applied to correct aberrant pre-mRNA splicing or to remove native in-frame exons harboring recurrent loss-of-function mutations. Both approaches aim to restore the original open reading frame and protein function. By targeting the pre-mRNA, ASOs are able to simultaneously and transiently modulate all endogenous transcripts encoding the different protein isoforms without altering transcription levels. We previously presented ASO-induced splice correction as a promising treatment option for the correction of aberrant mRNA splicing caused by the deep intronic c.7595-2144A>G mutation in USH2A (Slijkerman, R. W., et al, Therapy—Nucleic Acids, 2016. 5: p. e381).

[0005] More recently, we published the first ASO-based exon skipping therapy for mutations affecting USH2A exon 13 (Dulla, K., et al., Molecular Therapy, 2021). This single exon skipping therapy reached the clinical phase and resulted in a concordant benefit in multiple parameters of visual function (i.e. visual acuity, static perimetry and retinal imaging) without induction of any serious adverse events (Trial #NCT03780257) (Therapeutics, P., ProQR Announces Positive Results from Clinical Trial of QR-421a in Usher Syndrome and Plans to Start Pivotal Trials. 2021). Skipping of USH2A exon 13 was not intended to result in the removal of a single protein domain. Instead, it resulted in the loss of 4 EGF-lam domains and formation of one EGF-like hybrid domain. The resulting shortened usherin protein was shown to retain function. The amount of single USH2A exons that meet all criteria, and of which skipping is predicted to result in a functional protein, is minimal.

[0006] However, there remains a need to for treatment options for Usher syndrome patients that are affected by mutations in, or malfunction of other regions of the transcript. To date treatment options for these Usher patients are limited to cochlear implants or hearing aids.

### SUMMARY OF THE INVENTION

[0007] The invention relates to a set of antisense oligonucleotides for skipping of exon 30 and 31 that bind to and/or are complementary to a polynucleotide with the nucleotide sequence as shown in SEQ ID NO: 1. Preferably the set of antisense oligonucleotides bind to and/or are complementary to a polynucleotide selected from the group consisting of SEQ ID NO: 2, SEQ ID NO: 3 and SEQ ID NO: 4, preferably to a polynucleotide selected from the group consisting of SEQ ID NO: 5, SEQ ID NO: 6, SEQ ID NO:7, and SEQ ID NO: 8, and preferably to a polynucleotide selected from the group consisting of SEQ ID NO: 9, SEQ ID NO:10, SEQ ID NO:11 and SEQ ID NO:12 or a part thereof.

[0008] The invention further provides for a set of antisense oligonucleotides for skipping of exon 30 and 31 that comprises at least two antisense oligonucleotides that comprise or consist of SEQ ID NO: 13, 14, 15 or 16.

[0009] In a further aspect, the invention provides for a viral vector expressing at least one antisense oligonucleotide for skipping exons 30 or 31 as defined herein when placed under conditions conducive to expression of the molecule.

[0010] In yet a further aspect the invention provides for a pharmaceutical composition comprising the set of antisense oligonucleotides for skipping exons 30 and 31 as described herein or the viral vector as described herein and a pharmaceutically acceptable excipient.

[0011] The invention also provides for a set of antisense oligonucleotides for skipping exons 30 and 31 as described herein or the viral vector as described herein for use as a medicament. In some embodiments the set of antisense oligonucleotides for skipping exons 30 and 31 as described herein or the viral vector as described herein is for use in the treatment of a USH2A related disease or condition requiring modulating splicing of antisense oligonucleotide. In some embodiments wherein the USH2A related disease or condition is USH2A-associated Retinitis pigmentosa (RP).

[0012] The invention further provides for a method for modulating splicing of USH2A in a cell, said method comprising contacting said cell with the set of antisense oligonucleotides for skipping of exon 30 and 31 as described herein, the vector according as described herein or the pharmaceutical composition as described herein.

[0013] Lastly the invention provides for a use of the set of antisense oligonucleotides for skipping of exon 30 and 31 as described herein, the vector as described herein or the pharmaceutical composition according to as described herein for treating an USH2A related disease or a condition requiring modulating splicing of USH2A.

### DETAILED DESCRIPTION OF THE INVENTION

[0014] Calculations based on available carrier frequencies in the general population for the various reported pathogenic variants indicate that 22,000 individuals worldwide suffer from USH2A-associated disease caused by (a) variant(s) in these exons. Surprisingly it has now been demonstrated that specific antisense oligonucleotides (ASOs) are able to induce the dual skipping of exons 30 and 31. This dual exon skipping results in a transcript encoding a shortened usherin protein that lacks exactly one of the repetitive fibronectin type III (FN3) domains. This carefully designed dual exon skipping approach is further shown to be highly promising as a future treatment option for USH2A-associated RP.

[0015] Accordingly, in a first aspect, the invention relates to a set of antisense oligonucleotides for the skipping of exon 30 and 31 of USH2A that bind to and/or are complementary to a polynucleotide with the nucleotide sequence as shown in SEQ ID NO: 1. Preferably the antisense oligonucleotides bind to and/or are complementary to a polynucleotide with the nucleotide selected from the group consisting of SEQ ID NO: 2, SEQ ID NO: 3 and SEQ ID NO: 4. More preferably the polynucleotide is selected from the group consisting of SEQ ID NO: 5, SEQ ID NO:6, SEQ ID NO:7, and SEQ ID NO: 8 and even more preferably the polynucleotide is selected from the group consisting of SEQ ID NO: 9, SEQ ID NO: 10, SEQ ID NO:11 and SEQ ID NO:12 or a part thereof.

[0016] The terms “antisense oligonucleotide”, “ASO” and “AON” are used interchangeably herein and are understood to refer to an oligonucleotide molecule comprising a nucleotide sequence which is substantially complementary to a target nucleotide sequence in a pre-mRNA molecule, hnRNA (heterogenous nuclear RNA) or mRNA molecule. The degree of complementarity (or substantial complementarity) of the antisense sequence is preferably such that a molecule comprising the antisense sequence can form a stable hybrid with the target nucleotide sequence in the RNA molecule under physiological conditions. Binding of an ASO to its target can easily be assessed by the person skilled in the art using techniques that are known in the field such as the gel mobility shift assay as described in EP1619249.

[0017] The term “set” as used herein is defined as comprising at least two, at least three, at least four or more antisense oligonucleotides that bind and/or are complementary to a polynucleotide with the nucleotide sequence as shown in SEQ ID NO: 1, preferably selected from the group consisting of SEQ ID NO: 2, SEQ ID NO: 3 and SEQ ID NO: 4, preferably selected from the group consisting of SEQ ID NO: 5, SEQ ID NO:6, SEQ ID NO:7, and SEQ ID NO: 8, preferably selected from the group consisting of SEQ ID NO: 9, SEQ ID NO:10, SEQ ID NO:11 and SEQ ID NO:12 or a part thereof. In certain embodiments the set of antisense oligonucleotides according to the invention comprises at least one antisense oligonucleotide that binds and/or is complementary to SEQ ID NO: 3, preferably that binds and/or is complementary to SEQ ID NO: 5 and SEQ ID NO:6, preferably selected from the group consisting of SEQ ID NO: 9 and SEQ ID NO:10 or a part thereof and at least one antisense oligonucleotide that binds and/or is complementary to SEQ ID NO: 4, preferably that binds and/or is complementary to SEQ ID NO: 7 and SEQ ID NO:8, preferably selected from the group consisting of SEQ ID NO: 11 and SEQ ID NO:12 or a part thereof. In certain embodiments the set of antisense oligonucleotides according to the invention comprises at least two antisense oligonucleotides that binds to SEQ ID NO: 3, preferably that binds and/or is complementary to SEQ ID NO: 5 and SEQ ID NO:6, preferably selected from the group consisting of SEQ ID NO: 9 and SEQ ID NO:10 or a part thereof and at least one antisense oligonucleotide that binds to SEQ ID NO: 4 preferably that binds and/or is complementary to SEQ ID NO: 7 and SEQ ID NO:8, preferably selected from the group consisting of SEQ ID NO: 11 and SEQ ID NO:12 or a part thereof.

[0018] The term “complementary” used in the context of the invention indicates that some mismatches in the antisense sequence are allowed as long as the functionality, i.e. inducing the skipping of exons 30-31 is achieved. Preferably, the complementarity is from 90% to 100%. In general this allows for 1 or 2 mismatches in an ASO of 20 nucleotides or 1, 2, 3 or 4 mismatches in an ASO of 40 nucleotides, or 1, 2, 3, 4, 5 or 6 mismatches in an ASO of 60 nucleotides, etc. Optionally, said ASO may further be tested by transfection into isolated cells comprising USH2A. The complementary regions are preferably designed such that, when combined, they are specific for the intron or exon in the pre-mRNA or mRNA. Such specificity may be created with various lengths of complementary regions, as this depends on the actual sequences in other (pre-) mRNA molecules in the system. The risk that the ASO will also be able to hybridize to one or more other (pre-) mRNA molecules decreases with increasing size of the ASO. It is clear that ASOs comprising mismatches in the region of complementarity but that retain the capacity to hybridize and/or bind to the targeted region(s) in the (pre-) mRNA, can be used in the invention. However, preferably at least the complementary parts do not comprise such mismatches as ASOs lacking mismatches in the complementary part typically have a higher efficiency and a higher specificity than ASOs having such mismatches in one or more complementary regions. It is thought, that higher hybridization strengths, (i.e. increasing number of interactions with the opposing strand) are favorable in increasing the efficiency of the process of interfering with the splicing or mRNA degradation machinery of the system.

[0019] Each ASO withing the set ASOs of according to the invention preferably does not contain a stretch of CpG, more preferably does not contain any CpG. The presence of a CpG or a stretch of CpG in an oligonucleotide is usually associated with an increased immunogenicity of said oligonucleotide (Dorn and Kippenberger, 2008). This increased immunogenicity is undesired since it may induce damage of the tissue to be treated, i.e. the retina or the inner ear. Immunogenicity may be assessed in an animal model by assessing the presence of CD4+ and/or CD8+ cells and/or inflammatory mononucleocyte infiltration. Immunogenicity may also be assessed in blood of an animal or of a human being treated with an ASO according to the invention by detecting the presence of a neutralizing antibody and/or an antibody recognizing said ASO using a standard immunoassay known to the skilled person. An inflammatory reaction, type I-like interferon production, IL-12 production and/or an increase in immunogenicity may be assessed by detecting the presence or an increasing amount of a neutralizing antibody or an antibody recognizing said ASO using a standard immunoassay. The ASO according to the invention furthermore preferably has acceptable RNA binding kinetics and/or thermodynamic properties. The RNA binding kinetics and/or thermodynamic properties are at least in part determined by the melting temperature of an oligonucleotide (Tm; calculated with the oligonucleotide properties calculator (www.unc.edu/-cail/biotool/oligo/index) for single stranded RNA using the basic Tm and the nearest neighbor model), and/or the free energy of the ASO-target intron/exon complex (using RNA structure version 4.5). If a Tm is too high, the ASO is expected to be less specific. An acceptable Tm and free energy depend on the sequence of the ASO. Therefore, it is difficult to give preferred ranges for each of these parameters. An acceptable Tm may be ranged between 35 and 70° C. and an acceptable free energy may be ranged between 15 and 45 kcal/mol.

[0020] In certain embodiments, each of the antisense oligonucleotides within the set of antisense oligonucleotides for skipping exons 30 and 31 according to the invention has a length of from about 8 to about 40 nucleotides, preferably from about 10 to about 40 nucleotides, more preferably from about 14 to about 30 nucleotides, more preferably from about 16 to about 24 nucleotides, such as 16, 17, 18, 19, 20, 21, 22, 23 or 24 nucleotides.

[0021] In certain embodiments, the set of antisense oligonucleotides for skipping of exon 30 and 31 according as described herein comprises at least two antisense oligonucleotides that comprise or consist of SEQ ID NO: 13, 14, 15 or 16. In certain embodiments, the set of antisense oligonucleotides for skipping of exon 30 and 31 according as described herein comprises at least three or at least four antisense oligonucleotides that comprise or consist of SEQ ID NO: 13, 14, 15 or 16.

[0022] In certain embodiments, the set of antisense oligonucleotides according to the invention is selected from the group consisting of:
[0023] an antisense oligonucleotides that comprises or consists of SEQ ID NO: 13 and an antisense oligonucleotides that comprises or consists of SEQ ID NO: 15;
[0024] an antisense oligonucleotides that comprises or consists of SEQ ID NO: 13 and an antisense oligonucleotides that comprises or consists of SEQ ID NO: 16;
[0025] an antisense oligonucleotides that comprises or consists of SEQ ID NO: 14 and an antisense oligonucleotides that comprises or consists of SEQ ID NO: 15; and
[0026] an antisense oligonucleotides that comprises or consists of SEQ ID NO: 14 and an antisense oligonucleotides that comprises or consists of SEQ ID NO: 16.

[0027] In certain embodiments, the set of antisense oligonucleotides according to the invention is selected from the group consisting of:
[0028] an antisense oligonucleotides that comprises or consists of SEQ ID NO: 15, an antisense oligonucleotides that comprises or consists of SEQ ID NO: 13 and an antisense oligonucleotides that comprises or consists of SEQ ID NO: 14; and
[0029] an antisense oligonucleotides that comprises or consists of SEQ ID NO: 16, an antisense oligonucleotides that comprises or consists of SEQ ID NO: 13 and an antisense oligonucleotides that comprises or consists of SEQ ID NO: 14.

[0030] It is preferred that each antisense oligonucleotide for skipping exons 30 and 31 within the set of antisense oligonucleotides of the invention comprises one or more residues that are modified to increase nuclease resistance, and/or to increase the affinity of the antisense oligonucleotide for the target sequence. Therefore, in a certain embodiment, the antisense nucleotide sequence comprises at least one nucleotide analogue or equivalent, wherein a nucleotide analogue or equivalent is defined as a residue having a modified base, and/or a modified backbone, and/or a non-natural internucleoside linkage, or a combination of these modifications.

[0031] In certain embodiments, the nucleotide analogue or equivalent comprises a modified backbone. Examples of such backbones are provided by morpholino backbones, carbamate backbones, siloxane backbones, sulfide, sulfoxide and sulfone backbones, formacetyl and thioformacetyl backbones, methyleneformacetyl backbones, riboacetyl backbones, alkene containing backbones, sulfamate, sulfonate and sulfonamide backbones, methyleneimino and methylenehydrazino backbones, and amide backbones. Phosphorodiamidate morpholino oligomers are modified backbone oligonucleotides that have previously been investigated as antisense agents.

[0032] Morpholino oligonucleotides have an uncharged backbone in which the deoxyribose sugar of DNA is replaced by a six membered ring and the phosphodiester linkage is replaced by a phosphorodiamidate linkage. Morpholino oligonucleotides are resistant to enzymatic degradation and appear to function as antisense agents by arresting translation or interfering with pre-mRNA splicing rather than by activating RNase H. Morpholino oligonucleotides have been successfully delivered to tissue culture cells by methods that physically disrupt the cell membrane, and one study comparing several of these methods found that scrape loading was the most efficient method of delivery; however, because the morpholino backbone is uncharged, cationic lipids are not effective mediators of morpholino oligonucleotide uptake in cells. A recent report demonstrated triplex formation by a morpholino oligonucleotide and, because of the non-ionic backbone, these studies showed that the morpholino oligonucleotide was capable of triplex formation in the absence of magnesium.

[0033] In further embodiments that the linkage between the residues in a backbone do not include a phosphorus atom, such as a linkage that is formed by short chain alkyl or cycloalkyl internucleoside linkages, mixed heteroatom and alkyl or cycloalkyl internucleoside linkages, or one or more short chain heteroatomic or heterocyclic internucleoside linkages.

[0034] Examples of nucleotide analogue or equivalent comprises a Peptide Nucleic Acid (PNA), having a modified polyamide backbone (Nielsen, et al. (1991) Science 254, 1497-1500). PNA-based molecules are true mimics of DNA molecules in terms of base-pair recognition. The backbone of the PNA is composed of N-(2-aminoethyl)-glycine units linked by peptide bonds, wherein the nucleobases are linked to the backbone by methylene carbonyl bonds. An alternative backbone comprises a one-carbon extended pyrrolidine PNA monomer (Govindaraju and Kumar (2005) Chem. Commun, 495-497). Since the backbone of a PNA molecule contains no charged phosphate groups, PNA-RNA hybrids are usually more stable than RNA-RNA or RNA-DNA hybrids, respectively (Egholm et al (1993) Nature 365, 566-568). In certain embodiments the backbone comprises a morpholino nucleotide analog or equivalent, in which the ribose or deoxyribose sugar is replaced by a 6-membered morpholino ring. In certain embodiments the nucleotide analog or equivalent comprises a phosphorodiamidate morpholino oligomer (PMO), in which the ribose or deoxyribose sugar is replaced by a 6-membered morpholino ring, and the anionic phosphodiester linkage between adjacent morpholino rings is replaced by a non-ionic phosphorodiamidate linkage.

[0035] In yet a further embodiment, a nucleotide analogue or equivalent of the invention comprises a substitution of one of the non-bridging oxygens in the phosphodiester linkage. This modification slightly destabilizes base-pairing but adds significant resistance to nuclease degradation. A preferred nucleotide analogue or equivalent comprises phosphorothioate, chiral phosphorothioate, phosphorodithioate, phosphotriester, aminoalkylphosphotriester, H-phosphonate, methyl and other alkyl phosphonate including 3′-alkylene phosphonate, 5′-alkylene phosphonate and chiral phosphonate, phosphinate, phosphoramidate including 3′-amino phosphoramidate and aminoalkylphosphoramidate, thionophosphoramidate, thionoalkylphosphonate, thionoalkylphosphotriester, selenophosphate or boranophosphate.

[0036] In certain embodiments the nucleotide analogue or equivalent of the invention comprises one or more sugar moieties that are mono- or disubstituted at the 2′, 3′ and/or 5′ position such as a —OH; —F; substituted or unsubstituted, linear or branched lower (Cl—C10) alkyl, alkenyl, alkynyl, alkaryl, allyl, or aralkyl, that may be interrupted by one or more heteroatoms; O-, S-, or N-alkyl; O-, S-, or N-alkenyl; O-, S- or N-alkynyl; O-, S-, or N-allyl; O-alkyl-O-alkyl, -methoxy, -aminopropoxy; methoxyethoxy; dimethylaminooxyethoxy; and -dimethylaminoethoxyethoxy.

[0037] The sugar moiety can be a pyranose or derivative thereof, or a deoxypyranose or derivative thereof, preferably ribose or derivative thereof, or deoxyribose or derivative of. A preferred derivatized sugar moiety comprises a Locked Nucleic Acid (LNA), in which the 2′-carbon atom is linked to the 3′ or 4′ carbon atom of the sugar ring thereby forming a bicyclic sugar moiety. A preferred LNA comprises 2′-O, 4′-C-ethylene-bridged nucleic acid (Morita et al. 2001. Nucleic Acid Res Supplement No. 1:241-242). These substitutions render the nucleotide analogue or equivalent RNase H and nuclease resistant and increase the affinity for the target RNA.

[0038] In another embodiment, a nucleotide analogue or equivalent of the invention comprises one or more base modifications or substitutions. Modified bases comprise synthetic and natural bases such as inosine, xanthine, hypoxanthine and other -aza, deaza, -hydroxy, -halo, -thio, thiol, -alkyl, -alkenyl, -alkynyl, thioalkyl derivatives of pyrimidine and purine bases that are or will be known in the art.

[0039] It is understood by a skilled person that it is not necessary for all positions in an antisense oligonucleotide to be modified uniformly. In addition, more than one of the aforementioned analogues or equivalents may be incorporated in a single antisense oligonucleotide or even at a single position within an antisense oligonucleotide. In certain embodiments, an antisense oligonucleotide of the invention has at least two different types of analogues or equivalents.

[0040] Accordingly, each antisense oligonucleotide for skipping exons 30 and 31 within the set of antisense oligonucleotides of the invention comprises a 2′-O alkyl phosphorothioate antisense oligonucleotide, such as 2′-O-methyl modified ribose (RNA), 2′-O-ethyl modified ribose, 2′-O-methoxyethyl modified ribose, 2′-O-propyl modified ribose, and/or substituted derivatives of these modifications such as halogenated derivatives.

[0041] In certain embodiments, the set of antisense oligonucleotides for skipping exons 30 and 31 according to the invention comprises an antisense oligonucleotide that comprises or consists of SEQ ID NO: 13 that comprises a 2′-O-methoxyethyl modified ribose and a phosphorothioate backbone.

[0042] In certain embodiments, the set of antisense oligonucleotides for skipping exons 30 and 31 according to the invention comprises an antisense oligonucleotide that comprises or consists of SEQ ID NO: 14 that comprises a 2′-O-methoxyethyl modified ribose and a phosphorothioate backbone.

[0043] In certain embodiments, the set of antisense oligonucleotides for skipping exons 30 and 31 according to the invention comprises an antisense oligonucleotide that comprises or consists of SEQ ID NO: 15 that comprises a 2′-O-methoxyethyl modified ribose and a phosphorothioate backbone.

[0044] In certain embodiments, the set of antisense oligonucleotides for skipping exons 30 and 31 according to the invention comprises an antisense oligonucleotide comprises or consists of SEQ ID NO: 16 that comprises a 2′-O-methoxyethyl modified ribose and a phosphorothioate backbone.

[0045] Each antisense oligonucleotide for skipping exons 30 and 31 according to the invention, preferably, may be delivered as such. However, an antisense oligonucleotide for skipping exons 30 and 31 may also be encoded by a viral vector. Typically, this is in the form of an RNA transcript that comprises the sequence of an oligonucleotide according to the invention in a part of the transcript. Accordingly, in one aspect, the invention provides for a viral vector expressing at least one antisense oligonucleotide for skipping exons 30 or 31 as defined herein when placed under conditions conducive to expression of the molecule.

[0046] Viral vectors as used herein include but are not limited to lentiviral vector systems and adenoviral vector systems.

[0047] A preferred expression system for an ASO for skipping exons 30 and 31 according to the invention is an adenovirus associated virus (AAV)-based vector. Single chain and double chain AAV-based vectors have been developed that can be used for prolonged expression of antisense nucleotide sequences for highly efficient degradation of transcripts. A preferred AAV-based vector, for instance, comprises an expression cassette that is driven by an RNA polymerase Ill-promoter (Pol III) or an RNA polymerase II promoter (Pol II). A preferred RNA promoter is, for example, a Pol III U6 RNA promoter, or a Pol II U7 RNA promoter.

[0048] The invention accordingly provides for a viral-based vector, comprising a Pol II or a Pol III promoter driven expression cassette for expression of an antisense oligonucleotide for skipping exons 30-31 of USHA2A.

[0049] An AAV vector according to the invention is a recombinant AAV vector and refers to an AAV vector comprising part of an AAV genome comprising an encoded ASO for the skipping of exons 30-31 of USH2A according to the invention encapsidated in a protein shell of capsid protein derived from an AAV serotype as depicted elsewhere herein. Part of an AAV genome may contain the inverted terminal repeats (ITR) derived from an adeno-associated virus serotype, such as AAV1, AAV2, AAV3, AAV4, AAV5, AAV8, AAV9 and others. A protein shell comprised of capsid protein may be derived from an AAV serotype such as AAV1, 2, 3, 4, 5, 8, 9 and others. A protein shell may also be named a capsid protein shell. AAV vector may have one or preferably all wild type AAV genes deleted, but may still comprise functional ITR nucleic acid sequences. Functional ITR sequences are necessary for the replication, rescue and packaging of AAV virions. The ITR sequences may be wild type sequences or may have at least 80%, 85%, 90%, 95, or 100% sequence identity with wild type sequences or may be altered by for example in insertion, mutation, deletion or substitution of nucleotides, as long as they remain functional. In this context, functionality refers to the ability to direct packaging of the genome into the capsid shell and then allow for expression in the host cell to be infected or target cell. In the context of the invention a capsid protein shell may be of a different serotype than the AAV vector genome ITR. An AAV vector according to present the invention may thus be composed of a capsid protein shell, i.e. the icosahedral capsid, which comprises capsid proteins (VP1, VP2, and/or VP3) of one AAV serotype, e.g. AAV serotype 2, whereas the ITRs sequences contained in that AAV5 vector may be any of the AAV serotypes described above, including an AAV2 vector. An “AAV2 vector” thus comprises a capsid protein shell of AAV serotype 2, while e.g. an “AAV5 vector” comprises a capsid protein shell of AAV serotype 5, whereby either may encapsidate any AAV vector genome ITR according to the invention.

[0050] Preferably, a recombinant AAV vector according to the invention comprises a capsid protein shell of AAV serotype 2, 5, 8 or AAV serotype 9 wherein the AAV genome or ITRs present in said AAV vector are derived from AAV serotype 2, 5, 8 or AAV serotype 9; such AAV vector is referred to as an AAV2/2, AAV 2/5, AAV2/8, AAV2/9, AAV5/2, AAV5/5, AAV5/8, AAV 5/9, AAV8/2, AAV 8/5, AAV8/8, AAV8/9, AAV9/2, AAV9/5, AAV9/8, or an AAV9/9 vector.

[0051] More preferably, a recombinant AAV vector according to the invention comprises a capsid protein shell of AAV serotype 2 and the AAV genome or ITRs present in said vector are derived from AAV serotype 5; such vector is referred to as an AAV 2/5 vector.

[0052] More preferably, a recombinant AAV vector according to the invention comprises a capsid protein shell of AAV serotype 2 and the AAV genome or ITRs present in said vector are derived from AAV serotype 8; such vector is referred to as an AAV 2/8 vector.

[0053] More preferably, a recombinant AAV vector according to the invention comprises a capsid protein shell of AAV serotype 2 and the AAV genome or ITRs present in said vector are derived from AAV serotype 9; such vector is referred to as an AAV 2/9 vector.

[0054] More preferably, a recombinant AAV vector according to the invention comprises a capsid protein shell of AAV serotype 2 and the AAV genome or ITRs present in said vector are derived from AAV serotype 2; such vector is referred to as an AAV 2/2 vector.

[0055] A nucleic acid molecule encoding an ASO according to the invention represented by a nucleic acid sequence of choice is preferably inserted between the AAV genome or ITR sequences as identified above, for example an expression construct comprising an expression regulatory element operably linked to a coding sequence and a 3′ termination sequence.

[0056] “AAV helper functions” generally refers to the corresponding AAV functions required for AAV replication and packaging supplied to the AAV vector in trans. AAV helper functions complement the AAV functions which are missing in the AAV vector, but they lack AAV ITRs (which are provided by the AAV vector genome). AAV helper functions include the two major ORFs of AAV, namely the rep coding region and the cap coding region or functional substantially identical sequences thereof. Rep and Cap regions are well known in the art, see e.g. (Chiorini et al., 1999) or U.S. Pat. No. 5,139,941, incorporated herein by reference. The AAV helper functions can be supplied on an AAV helper construct, which may be a plasmid. Introduction of the helper construct into the host cell can occur e.g. by transformation, transfection, or transduction prior to or concurrently with the introduction of the AAV genome present in the AAV vector as identified herein. The AAV helper constructs according to the invention may thus be chosen such that they produce the desired combination of serotypes for the AAV vector's capsid protein shell on the one hand and for the AAV genome present in said AAV vector replication and packaging on the other hand.

[0057] “AAV helper virus” provides additional functions required for AAV replication and packaging. Suitable AAV helper viruses include adenoviruses, herpes simplex viruses (such as HSV types 1 and 2) and vaccinia viruses. The additional functions provided by the helper virus can also be introduced into the host cell via vectors, as described in U.S. Pat. No. 6,531,456 incorporated herein by reference.

[0058] Preferably, an AAV genome as present in a recombinant AAV vector according to the invention does not comprise any nucleotide sequences encoding viral proteins, such as the rep (replication) or cap (capsid) genes of AAV. An AAV genome may further comprise a marker or reporter gene, such as a gene for example encoding an antibiotic resistance gene, a fluorescent protein (e.g. gfp) or a gene encoding a chemically, enzymatically or otherwise detectable and/or selectable product (e.g. lacZ, aph, etc.) known in the art.

[0059] A preferred AAV vector according to the invention is an AAV vector, preferably an AAV2/5, AAV2/8, AAV2/9 or AAV2/2 vector, carrying an ASO for skipping exons 30 and 31 according to the invention that is an ASO that comprises, or preferably consists of, a sequence that is:
[0060] complementary or substantially complementary to a nucleotide sequence consisting of SEQ ID NO 1, preferably selected from the group consisting of SEQ ID NO: 2, SEQ ID NO: 3 and SEQ ID NO: 4, preferably selected from the group consisting of SEQ ID NO: 5, SEQ ID NO:6, SEQ ID NO: 7, and SEQ ID NO: 8, preferably selected from the group consisting of SEQ ID NO: 9, SEQ ID NO: 10, SEQ ID NO: 11 and SEQ ID NO:12 or a part thereof.

[0061] Even more preferably, the ASO comprises or consists of a polynucleotide with a nucleotide sequence selected from the group consisting of SEQ ID NO: 13, 14, 15 and 16.

[0062] Improvements in means for providing an individual or a cell, tissue, organ of said individual with an antisense oligonucleotide for skipping exons 30-31 according to the invention, are anticipated considering the progress that has already thus far been achieved. Such future improvements may of course be incorporated to achieve the mentioned effect on restructuring of mRNA using a method according to the invention.

[0063] Alternatively, a preferred delivery method for an antisense oligonucleotide for skipping exons 30-31 as described herein or a plasmid for expression of such ASO is a viral vector or are nanoparticles. In certain embodiments, the preferred delivery method for an ASO as described herein is by use of slow-release or sustained release capsules. In certain embodiments, the preferred delivery method for an ASO as described herein is by use of hydrogels (such as described in WO1993/01286).

[0064] Alternatively, a preferred delivery method for an antisense oligonucleotide or a plasmid for antisense oligonucleotide expression is a viral vector or nanoparticles. Preferably viral vectors or nanoparticles are delivered to retina or inner ear cells. Such delivery to retina or inner ear cells or other relevant cells may be in vivo, in vitro or ex vivo.

[0065] Alternatively, a plasmid can be provided by transfection using known transfection agentia. For intravenous, subcutaneous, intramuscular, intrathecal and/or intraventricular administration it is preferred that the solution is a physiological salt solution. Particularly preferred in the invention is the use of an excipient or transfection agentia that will aid in delivery of each of the constituents as defined herein to a cell and/or into a cell, preferably a retina cell. Preferred are excipients or transfection agentia capable of forming complexes, nanoparticles, micelles, vesicles and/or liposomes that deliver each constituent as defined herein, complexed or trapped in a vesicle or liposome through a cell membrane. Many of these excipients are known in the art. Suitable excipients or transfection agentia comprise polyethylenimine (PEI; ExGen500 (MBI Fermentas)), LipofectAMINE™ 2000 (Invitrogen) or derivatives thereof, or similar cationic polymers, including polypropyleneimine or polyethylenimine copolymers (PECs) and derivatives, synthetic amphiphils (SAINT-18), Lipofectin™, DOTAP and/or viral capsid proteins that are capable of self assembly into particles that can deliver each constitutent as defined herein to a cell, preferably a retina cell. Such excipients have been shown to efficiently deliver an oligonucleotide such as antisense nucleic acids to a wide variety of cultured cells, including retina cells. Their high transfection potential is combined with an excepted low to moderate toxicity in terms of overall cell survival. The ease of structural modification can be used to allow further modifications and the analysis of their further (in vivo) nucleic acid transfer characteristics and toxicity.

[0066] Lipofectin represents an example of a liposomal transfection agent. It consists of two lipid components, a cationic lipid N-[1-(2,3 dioleoyloxy) propyl]-N, N, N-trimethylammonium chloride (DOTMA) (cp. DOTAP which is the methylsulfate d a neutral lipid dioleoylphosphatidylethanolamine (DOPE). The neutral component mediates the intracellular release. Another group of delivery systems are polymeric nanoparticles.

[0067] Polycations such as diethylaminoethylaminoethyl (DEAE)-dextran, which are well known as DNA transfection reagent can be combined with butylcyanoacrylate (PBCA) and hexylcyanoacrylate (PHCA) to formulate cationic nanoparticles that can deliver each constituent as defined herein, preferably an oligonucleotide, across cell membranes into cells.

[0068] In addition to these common nanoparticle materials, the cationic peptide protamine offers an alternative approach to formulate an oligonucleotide with colloids. This colloidal nanoparticle system can form so called proticles, which can be prepared by a simple self-assembly process to package and mediate intracellular release of an oligonucleotide. The skilled person may select and adapt any of the above or other commercially available alternative excipients and delivery systems to package and deliver an exon skipping molecule for use in the current invention to deliver it for the prevention, treatment or delay of a USH2A related disease or condition. “Prevention, treatment or delay of a USH2A related disease or condition” is herein preferably defined as preventing, halting, ceasing the progression of, or reversing partial or complete visual impairment or blindness, as well as preventing, halting, ceasing the progression of or reversing partial or complete auditory impairment or deafness that is caused by a genetic defect in the USH2A gene.

[0069] An antisense oligonucleotide can be linked to a moiety that enhances uptake of the antisense oligonucleotide in cells, preferably retina cells. Examples of such moieties are cholesterols, carbohydrates, vitamins, biotin, lipids, phospholipids, cell-penetrating peptides including but not limited to antennapedia, TAT, transportan and positively charged amino acids such as oligoarginine, poly-arginine, oligolysine or polylysine, antigen-binding domains such as provided by an antibody, a Fab fragment of an antibody, or a single chain antigen binding domain such as a cameloid single domain antigen-binding domain.

[0070] In addition, each antisense oligonucleotide within the set of antisense oligonucleotides according to the invention could be covalently or non-covalently linked to a targeting ligand specifically designed to facilitate the uptake into the cell, cytoplasm and/or its nucleus. Such ligand could comprise (i) a compound (including but not limited to peptide(-like) structures) recognising cell, tissue or organ specific elements facilitating cellular uptake and/or (ii) a chemical compound able to facilitate the uptake in to cells and/or the intracellular release of an oligonucleotide from vesicles, e.g. endosomes or lysosomes.

[0071] Therefore, in a preferred embodiment, the set of antisense oligonucleotides for skipping exons 30 and 31 according to the invention according to the invention is formulated in a composition or a medicament or a composition, which is provided with at least an excipient and/or a targeting ligand for delivery and/or a delivery device thereof to a cell and/or enhancing its intracellular delivery.

[0072] It is to be understood that if a composition comprises an additional constituent such as an adjunct compound as later defined herein, each constituent of the composition may not be formulated in one single combination or composition or preparation. Depending on their identity, the skilled person will know which type of formulation is the most appropriate for each constituent as defined herein. In a preferred embodiment, the invention provides a composition or a preparation which is in the form of a kit of parts comprising an exon skipping molecule according to the invention and a further adjunct compound as later defined herein.

[0073] If required, the set of antisense oligonucleotides for skipping exons 30 and 31 according to the invention or the vector, preferably viral vector of the invention, can be incorporated into a pharmaceutically active mixture by adding a pharmaceutically acceptable carrier.

[0074] Accordingly, the invention also provides a composition, preferably a pharmaceutical composition, comprising the set of antisense oligonucleotides for skipping exons 30 and 31 according to the invention, or a viral vector according to the invention and a pharmaceutically acceptable excipient. Such composition may comprise at least two, at least three or at least four antisense oligonucleotides, or at least two, at least three or at least four viral vectors according to the invention. Such a pharmaceutical composition may comprise any pharmaceutically acceptable excipient, including a carrier, filler, preservative, adjuvant, solubilizer and/or diluent. Such pharmaceutically acceptable carrier, filler, preservative, adjuvant, solubilizer and/or diluent may for instance be found in Remington, 2000. Each feature of said composition has earlier been defined herein.

[0075] In certain embodiments, the pharmaceutical composition as described herein is administered through intravitreal or intratympanic administration. For delivery to the brain or pineal gland intrathecal injections or systemic delivery is also considered. Concentration or dose defined herein may refer to the total concentration or dose of all oligonucleotides used or the concentration or dose of each exon skipping molecule used or added. Therefore in one embodiment, there is provided a composition wherein each or the total amount of antisense oligonucleotides according to the invention used is dosed in an amount ranged from 0.01 and 30 mg/kg, preferably from 0.05 and 30 mg/kg. A suitable intravitreal dose would be between 0.05 mg and 5 mg, preferably between 0.1 and 1 mg per eye, such as about per eye: 0.1, 0.2, 0.3, 0.4, 0.5, 0.6, 0.7, 0.8, 0.9 or 1.0 mg. A suitable in intratympanic dose would be between 0.1 mg and 30 mg, preferably between 0.1 and 15 mg per ear, such as about: 0.1, 0.2, 0.3, 0.4, 0.5, 0.6, 0.7, 0.8, 0.9, 1.0, 2.0, 3.0, 4.0, 5.0, 6.0, 7.0, 8.0, 9.0, 10.0, 11.0, 12.0, 13.0, 14.0, or 15.0 mg per ear.

[0076] Preferably, the set of antisense oligonucleotides for skipping exons 30 and 31 according to the invention, the vector as described herein and the pharmaceutical composition as described herein is for use in the treatment of a USH2A related disease or condition of an individual. In all embodiments of the invention, the term “treatment” is understood to include the prevention and/or delay of the USH2A-related disease or condition. An individual, which may be treated using an antisense oligonucleotide for skipping exons 30-31 according to the invention, the vector as described herein and the pharmaceutical composition as described herein may already have been diagnosed as having a USH2A-related disease or condition.

[0077] Alternatively, an individual which may be treated using the set of antisense oligonucleotides for skipping exons 30 and 31 according to the invention may not have yet been diagnosed as having a USH2A-related disease or condition but may be an individual having an increased risk of developing a USH2A-related disease or condition in the future given his or her genetic background. A preferred individual is a human being. In a preferred embodiment the USH2A-related disease or condition is Usher Syndrome type 2.

[0078] Accordingly, the invention further provides a set of antisense oligonucleotides for skipping exons 30 and 31 according to the invention, or a viral vector according to the invention, or a composition according to the invention for use as a medicament, for treating a USH2A-related disease or condition requiring modulating splicing of USH2A and for use as a medicament for the prevention, treatment or delay of a USH2A-related disease or condition. A preferred USH2A-related disease or condition is Usher Syndrome type 2.

[0079] The invention further provides the use of a set of antisense oligonucleotide for skipping exons 30 and 31 according to the invention, or of a viral vector according to the invention, or a composition according to the invention for the treatment of a USH2A-related disease or condition requiring modulating splicing of USH2A. In a preferred embodiment the USH2A-related disease or condition is USH2A-associated Retinitis pigmentosa (RP).

[0080] The invention further provides the use of a set of antisense oligonucleotide for skipping exons 30 and 31 according to the invention, or of a viral vector according to the invention, or a composition according to the invention for the preparation of a medicament, for the preparation of a medicament for treating a USH2A-related disease or condition requiring modulating splicing of USH2A and for the preparation of a medicament for the prevention, treatment or delay of a USH2A-related disease or condition. A preferred USH2A-related disease or condition is Usher Syndrome type 2. Therefore in a further aspect, there is provided the use of a set of antisense oligonucleotide for skipping exons 30 and 31, viral vector or composition as defined herein for the preparation of a medicament, for the preparation of a medicament for treating a condition requiring modulating splicing of USH2A and for the preparation of a medicament for the prevention, treatment or delay of a USH2A-related disease or condition. A preferred USH2A-related disease or condition is USH2A-associated Retinitis pigmentosa (RP).

[0081] A treatment in a use or in a method according to the invention is at least once, lasts one week, one month, several months, one year, 2, 3, 4, 5, 6 years or longer, such as lifelong. Each antisense oligonucleotide for skipping exons 30 and 31 or equivalent thereof as defined herein for use according to the invention may be suitable for direct administration to a cell, tissue and/or an organ in vivo of individuals already affected or at risk of developing USH2A-related disease or condition, and may be administered directly in vivo, ex vivo or in vitro. The frequency of administration of an oligonucleotide, composition, compound or adjunct compound of the invention may depend on several parameters such as the severity of the disease, the age of the patient, the mutation of the patient, the number of antisense oligonucleotides (i.e. dose), the formulation of antisense oligonucleotides, the route of administration and so forth. The frequency may vary between daily, weekly, at least once in two weeks, or three weeks or four weeks or five weeks or a longer time period.

[0082] Dose ranges of oligonucleotides according to the invention are preferably designed on the basis of rising dose studies in clinical trials (in vivo use) for which rigorous protocol requirements exist. An oligonucleotide as defined herein, may be used at a dose which is ranged from 0.01 and 20 mg/kg, preferably from 0.05 and 20 mg/kg. A suitable intravitreal or intratympanic dose would be between 0.05 mg and 5 mg, preferably between 0.1 and 1 mg per eye or per ear, such as about per eye: 0.1, 0.2, 0.3, 0.4, 0.5, 0.6, 0.7, 0.8, 0.9 or 1.0 mg.

[0083] In a preferred embodiment, a concentration of an oligonucleotide as defined herein, which is ranged from 0.1 nM and 1 μM is used. Preferably, this range is for in vitro use in a cellular model such as retina or cochlear cells or retinal or cochlear tissue. More preferably, the concentration used is ranged from 1 to 400 nM, even more preferably from 10 to 200 nM, even more preferably from 50 to 100 nM. If several oligonucleotides are used, this concentration or dose may refer to the total concentration or dose of oligonucleotides or the concentration or dose of each oligonucleotide added.

[0084] In a preferred embodiment, a viral vector, preferably an AAV vector as described earlier herein, as delivery vehicle for a oligonucleotide according to the invention, is administered in a dose ranging from 1×10⁹-1×10¹⁷ virus particles per injection, more preferably from 1×10¹⁰-1×10¹² virus particles per injection.

[0085] The ranges of concentration or dose of oligonucleotide(s) as given above are preferred concentrations or doses for in vivo, in vitro or ex vivo uses. The skilled person will understand that depending on the oligonucleotide(s) used, the target cell to be treated, the gene target and its expression levels, the medium used and the transfection and incubation conditions, the concentration or dose of oligonucleotide(s) used may further vary and may need to be optimized any further.

[0086] The set of antisense oligonucleotide for skipping exons 30 and 31 according to the invention, or a viral vector according to the invention, or a composition according to the invention for use according to the invention may be suitable for administration to a cell, tissue and/or an organ in vivo of individuals already affected or at risk of developing a USH2A-related disease or condition, and may be administered in vivo, ex vivo or in vitro. The set of antisense oligonucleotide for skipping exons 30 and 31 according to the invention, or a viral vector according to the invention, or a composition according to the invention may be directly or indirectly administered to a cell, tissue and/or an organ in vivo of an individual already affected by or at risk of developing a USH2A-related disease or condition, and may be administered directly or indirectly in vivo, ex vivo or in vitro. As Usher Syndrome type 2 has a pronounced phenotype in retina and inner ear cells, it is preferred that said cells are retina or inner ear cells, it is further preferred that said tissue is the retina or the inner ear and/or it is further preferred that said organ comprises or consists of the eye or the ear.

[0087] The invention further provides a method for modulating splicing of USH2A in a cell comprising contacting the cell, preferably a retina cell, with a set of antisense oligonucleotide for skipping exons 30 and 31 according to the invention, or a viral vector according to the invention, or a composition according to the invention. The features of this aspect are preferably those defined earlier herein. Contacting the cell with an exon skipping molecule according to the invention, or a viral vector according to the invention, or a composition according to the invention may be performed by any method known by the person skilled in the art. Use of the methods for delivery of the set of antisense oligonucleotide for skipping exons 30 and 31, viral vectors and compositions described herein is included. Contacting may be directly or indirectly and may be in vivo, ex vivo or in vitro.

[0088] The invention further provides a method for the treatment of a USH2A-related disease or condition requiring modulating splicing of USH2A of an individual in need thereof, said method comprising contacting a cell, preferably a retina cell or cochlear cell, of said individual with a set of antisense oligonucleotide for skipping exons 30 and 31 according to the invention, or a viral vector according to the invention, or a composition according to the invention. The features of this aspect are preferably those defined earlier herein. Contacting the cell, preferably a retina cell or a cochlear cell with a set of oligonucleotides according to the invention, or a viral vector according to the invention, or a composition according to the invention may be performed by any method known by the person skilled in the art. Use of the methods for delivery of molecules, viral vectors and compositions described herein is included. Contacting may be directly or indirectly and may be in vivo, ex vivo or in vitro.

[0089] In yet another aspect, the invention provides for the use of the set of antisense oligonucleotides for skipping exons 30 and 31 according to the invention, or a viral vector according to the invention, or a composition according to the invention for treating an USH2A-related disease or a condition requiring modulating splicing of USH2A.

[0090] Unless otherwise indicated each embodiment as described herein may be combined with another embodiment as described herein.

[0091] In this document and in its claims, the verb “to comprise” and its conjugations is used in its non-limiting sense to mean that items following the word are included, but items not specifically mentioned are not excluded. In addition, reference to an element by the indefinite article “a” or “an” does not exclude the possibility that more than one of the element is present, unless the context clearly requires that there be one and only one of the elements. The indefinite article “a” or “an” thus usually means “at least one”.

[0092] The word “about” or “approximately” when used in association with a numerical value (e.g. about 10) preferably means that the value may be the given value (of 10) more or less 5% of the value.

[0093] The sequence information as provided herein should not be so narrowly construed as to require inclusion of erroneously identified bases. The skilled person is capable of identifying such erroneously identified bases and knows how to correct for such errors.

[0094] All patent and literature references cited in the present specification are hereby incorporated by reference in their entirety.

### DESCRIPTION OF THE FIGURES

[0095] FIG. 1: Overview of target sites for the designed antisense oligonucleotides (ASOs). ASOs that specifically induce skipping of (A) USH2A exon 30 or (B) USH2A exon 31 were designed. ASOs target either the intron-exon boundaries, or exonic splicing enhancer (ESE) motifs within the exons. Splicing Enhancer Matrices and Splicing Silencer Matrices were assessed and visualized using the ‘Human Splicing Finder’ website (http://www.umd.be/HSF3/).

[0096] FIG. 2: Generation of the minigene vectors. The genomic region containing (A) USH2A exon 30 or (B) USH2A exon 31 and flanking sequences were cloned into the pCi-Neo Rho destination vector. This resulted in two minigene vectors which contain the fragments of interest flanked by two rhodopsin exons under the control of a CMV promotor. pDEST_pCi-Neo Rho: pCi-Neo Rho destination vector.

[0097] FIG. 3: In silico modeling of usherin protein domain architecture after exon 30-31 skipping. (A) Schematic representation of the domain architecture of the large protein isoform of human and zebrafish usherin. The large protein isoforms of human and zebrafish usherin are comprised of the same repetitive protein domain architecture that includes a signal peptide, a laminin G-like domain (LamG-like), a laminin N-terminal domain (LamNT), 10 EGF-like motifs, four fibronectin type III (FN3) domains, two laminin G domains (LamG), 28 additional FN3 domains, one transmembrane domain and a short intracellular region with a C-terminal class I PDZ binding motif. Skipping of USH2A exons 30-31 results in the exclusion of one FN3 domain. The domain that is lost in human and zebrafish usherin is indicated with a dashed box. Numbers indicate amino acids. (B) 3D homology modeling of USH2A exons 30-31 skipping predicts the removal of exactly one FN3 domain without disturbing the folding of neighboring FN3 domains. The amino acids that are encoded by targeted exons are depicted in dark gray.

[0098] FIG. 4: Design and characterization of the ush2a^{Δexon30-31} zebrafish line. (A) Schematic representation of the exon excision approach. Sanger sequencing confirmed the presence of the anticipated excision in injected embryos (1 day post fertilization (dpf)). Excision of the genomic region containing ush2a exons 30 and 31 resulted in the insertion of two nucleotides (TT) at the repair junction. (B) RT-PCR analysis revealed the absence of ush2a exons 30 and 31 in ush2a^{Δexon30-31} larvae (5 days post fertilization (dpf)). Sanger sequencing of the ush2a^{Δexon30-31} amplicon confirmed the absence of the targeted exons from the transcript.

[0099] FIG. 5: Visualization of usherin proteins on retinal sections of wild-type, ush2a^{rmc1} and ush2a^{Δexon30-31} zebrafish. (A) Retinal cryosections of wild-type, ush2a^{rmc1} and ush2a^{Δexon30-31} larvae (5 days post fertilization (dpf)) stained with antibodies directed against usherin and centrin. Nuclei are counterstained with DAPI. In wild-type larvae, usherin is localized in the periciliary region, in close proximity to centrin. No usherin signal was detected in ush2a^{rmc1} zebrafish retinas, whereas in the retinas of wild-type and ush2a^{Δexon30-31} larvae usherin was present adjacent to the centrin immunoreactivity. Scale bar: 10 μm. OS: outer segment, CC: connecting cilium, IS: inner segment, ONL: outer nuclear layer. (B) Quantification of anti-usherin signal intensity at the periciliary region. Individual data points represent the mean fluorescence intensity of anti-usherin staining at the periciliary region of all photoreceptors of a single, central section of one larval zebrafish eye. Horizonal bars depict the mean signal intensity within a genotype (n=25-28 eyes). Data were analyzed using one-way ANOVA followed by Tukey's multiple comparison test. **** P≤0.0001.

[0100] FIG. 6: Visualization of Adgrv1 proteins on retinal sections of wild-type, ush2a^{rmc1} and ush2a^{Δexon30-31} zebrafish. (A) Retinal cryosections of wild-type, ush2a^{rmc1} and ush2a^{Δexon30-31} larvae (5 days post fertilization (dpf)) stained with antibodies directed against Adgrv1 and centrin. Nuclei are counterstained with DAPI. A reduced Adgrv1 signal was detected in ush2a^{rmc1} zebrafish retinas, whereas in the retinas of wild-type and ush2a^{Δexon30-31} larvae usherin was more abundantly present at the photoreceptor periciliary region, in close proximity to centrin. Scale bar: 10 μm. OS: outer segment, CC: connecting cilium, IS: inner segment, ONL: outer nuclear layer. (B) Quantification of anti-Adgrv1 signal intensity at the periciliary region. Individual data points represent the mean fluorescence intensity of anti-Adgrv1 staining at the periciliary region of all photoreceptors of a single, central section of one larval zebrafish eye. Horizonal bars depict the mean signal intensity within a genotype (n=14 eyes). Data were analyzed using one-way ANOVA followed by Tukey's multiple comparison test. **** P≤0.0001.

[0101] FIG. 7: Immunohistochemistry on retinal sections of wild-type, ush2a^{rmc1} and ush2a^{Δexon30-31} zebrafish. (A) Retinal cryosections of 6 days post fertilization (dpf) were analyzed for rhodopsin localization. Nuclei were counterstained with DAPI. In the retinas of wild-type and ush2a^{Δexon30-31} larvae rhodopsin was predominantly present in the photoreceptor outer segments, whereas in ush2a^{rmc1} zebrafish retinas rhodopsin signal was also detected in the outer nuclear layer, and more specifically the inner segments as indicated by arrowheads. Scale bar: 10 μm. ROS: rod outer segment, COS: cone outer segment, ONL: outer nuclear layer, INL: inner nuclear layer. (B) Scatterplot of rhodopsin localization spots in the outer nuclear layer of 6 dpf zebrafish obtained by manual counting and plotted per counted eye (n=12-14). Horizonal bars depict the mean signal intensity within a genotype. The amount of rhodopsin localization spots in the outer nuclear layer is significantly lower in wild-type and ush2a^{Δexon30-31} retinas as compared to ush2a^{rmc1} retinas. Data were analyzed using one-way ANOVA followed by Tukey's multiple comparison test. * P≤0.05.

[0102] FIG. 8: Identification of potent ASOs using a minigene splice assay. HEK293T cells were co-transfected with the minigene containing USH2A exon 31 and either ASO_31_1 or ASO_31_2 in a 250 nM concentration. The upper amplicon represents the transcript containing USH2A exon 31, whereas the lower amplicon represents the transcript lacking the targeted exon. GAPDH amplification is shown as a loading control. ASO: antisense oligonucleotide; PCR(−): negative PCR control.

[0103] FIG. 9: Validation of dual ASO-induced skipping of USH2A exon 30 using a minigene splice assay. HEK293T cells were co-transfected with the minigene vector and either ASO_30_1, ASO_30_2 or a cocktail of ASO_30_1 and ASO_30_2 in a final concentration of 100 or 250 nM. The upper amplicon represents the transcript containing USH2A exon 30, whereas the lower amplicon represents the transcript lacking USH2A exon 30. ASO: antisense oligonucleotide; PCR(−): negative PCR control.

[0104] FIG. 10. ASOs induce a dose-dependent skipping of USH2A exon 30 and 31. HEK293T cells are co-transfected with (A) the USH2A exon 30 minigene vector and different concentrations of ASOs targeting USH2A exon 30 or (B) the USH2A exon 31 minigene vector and different concentrations of ASO targeting USH2A exon 31. Each transfection resulted in an increase in exon skipped transcripts with increasing concentrations of ASO. Non-skipped amplicons and amplicons in which the targeted USH2A exon is skipped are indicated adjacent to the gel image. GAPDH amplification is shown as a loading control. ASO: antisense oligonucleotide; mmASO: mismatch ASO; PCR(−): negative PCR control.

[0105] FIG. 11: Validation of ASO-induced dual exon skipping for USH2A exons 30-31 in WERI-Rb-1 cells. Co-transfection of WERI-Rb-1 cells with ASOs targeting USH2A exons 30 and 31 resulted in combined skipping of the exons of interest. Co-transfection of WERI-Rb-1 cells with ASOs targeting USH2A exons 30 and 31 also resulted in additional skipping of exon 32. GAPDH amplification is shown as a loading control. ASO: antisense oligonucleotide; mmASO: mismatch ASO; PCR(−): negative PCR control.

### DESCRIPTION OF THE SEQUENCES

TABLE 1
Sequences

| SEQ ID NO: | Name |
|---|---|
| 1 | USH2A genomic DNA wild-type |
| 2 | USH2A exon 30-31 and flanking genomic sequence |
| 3 | USH2A exon 30 sequence |
| 4 | USH2A exon 31 sequence |
| 5 | ASO_30_1 target site and flanking sequences (+10 nt) |
| 6 | ASO_30_2 target site and flanking sequences (+10 nt) |
| 7 | ASO_31_1 target site and flanking sequences (+10 nt) |
| 8 | ASO_31_2 target site and flanking sequences (+10 nt) |
| 9 | ASO_30_1 target site and flanking sequences (+5 nt) |
| 10 | ASO_30_2 target site and flanking sequences (+5 nt) |
| 11 | ASO_31_1 target site and flanking sequences (+5 nt) |
| 12 | ASO_31_2 target site and flanking sequences (+5 nt) |
| 13 | ASO_30_1 |
| 14 | ASO_30_2 |
| 15 | ASO_31_1 |
| 16 | ASO_31_2 |
| 17 | T7 promoter sequence |
| 18 | Region complementary to constant oligo |
| 19 | constant oligo |
| 20 | target-specific oligo 5′ ush2a Δexo30-31 |
| 21 | target-specific oligo 3′ ush2a Δexo30-31 |
| 22 | ush2a wild-type forward primer |
| 23 | ush2a wild-type reverse primer |
| 24 | ush2a Δexon30-31 forward primer |
| 25 | ush2a Δexon30-31 reverse primer |
| 26 | ush2a exon 28-33 forward primer |
| 27 | ush2a exon 28-33 reverse primer |
| 28 | USH2A intron 29-30 forward primer |
| 29 | USH2A intron 29-30 reverse primer |
| 30 | USH2A intron 30-31 forward primer |
| 31 | USH2A intron 30-31 reverse primer |
| 32 | Rho exon 3-5 forward primer |
| 33 | Rho exon 3-5 reverse primer |
| 34 | ush2a exon 28-33 forward primer |
| 35 | ush2a exon 28-33 reverse primer |
| 36 | GAPDH forward primer |
| 37 | GAPDH reverse primer |
| 38 | mmASO_30_1 |
| 39 | mmASO_30_2 |
| 40 | mmASO_31_2 |

### EXAMPLES

[0106] In this study, we explored dual exon skipping as a future treatment option for patients with RP caused by mutations in the USH2A gene. Based on in silico protein analysis, and the reported presence of multiple RP-associated protein-truncating mutations, we opted to target exons 30-31 of human USH2A. Calculations based on available carrier frequencies in the general population for the various reported pathogenic variants Mutations in USH2A exons 30-31 (gnomAD v2.1.1) are estimaindicate that ˜ted to affect 22,000 individuals worldwide suffer from USH2A-associated disease caused by (a) variant(s) in these exons. and skipping of this combination of exons is predicted to result in a transcript encoding a shortened usherin protein that lacks exactly one of the 10 repetitive fibronectin type III (FN3) domains. To model the functional consequences of our exon skipping approach, we employed CRISPR/Cas9 and excised the orthologous target exons from the zebrafish genome. This resulted in the ush2a^{Δexon30-31} zebrafish line in which usherin protein expression was restored in photoreceptors, and both the localization of rhodopsin to the photoreceptor outer segment and the formation of the USH2 protein complex at the periciliary membrane was rescued. To translate these findings into a future treatment in man, we identified and in vitro validated ASOs with a high, sequence-specific dual exon skipping potential. Together, our data suggest that a carefully designed dual exon skipping approach, in which two exons remove a single protein domain, could be highly promising as a future treatment option for USH2A-associated RP.

### Materials and Methods

### Zebrafish Ethics, Maintenance and Husbandry

[0107] Animal experiments were conducted in accordance with the Dutch guidelines for the care and use of laboratory animals (Wet op de Dierproeven 1996) and European regulations (Directive 86/609/EEC), as approved by the Dutch Ethics committee of the Central Committee Animal Experimentation (Centrale Commissie Dierproeven [CCD]; Protocol #RU-DEC2016-0091). Wild-type Tupfel Longfin (TL) zebrafish and the previously described ush2a^{rmc1} mutants (c.2337_2342delinsAC; p.Cys780GInfsTer32) were used. Zebrafish were maintained and raised according to standard methods. Both adult and larval zebrafish were kept at a light-dark regime of 14 hours of light and 10 hours of darkness. Adult zebrafish were daily fed twice with Gemma Micro 300 dry pellets (#13177, Zebcare, Nederweert, The Netherlands) at ˜5% body weight and once with artemia. Embryos were obtained from natural spawning.

### Multiple Sequence Alignment

[0108] A multiple sequence alignment of the human usherin protein (ENSP00000305941_3) and zebrafish usherin protein (ENSDARP00000080636_3) was generated using AlignX in the Vector NTI software package (Vector NTI Advance 11).

### In Silico Modeling of the Effect of USH2A Exons 30-31 Skipping on FN3 Protein Domain Structure

[0109] The 5202 amino acid usherin protein sequence was selected from the UniProtKB database (www.uniprot.org/; acc. #075445) and was used as template protein sequence for modeling the effect of USH2A exons 30-31 skipping on the 3D protein domain structure of usherin. The effect of USH2A exons 30-31 skipping on the usherin protein structure was modeled in a chain of one laminin G (Lam G) domain followed by three consecutive fibronectin type III (FN3) domains. For prediction of the wild-type protein structure LamG (2), FN3_5, FN3_6 and FN3_7 were included, of which FN3_6 is encoded by USH2A exons 30-31. The structural model of usherin^{Δexon30-31} included LamG_2, FN3_5, FN3_7 and FN3_8. The AlphaFold2 (previously described) modeling script was used to generate the structural models of both wild-type and usherin^{Δexon30-31} proteins by employing standard parameters.

### CRISPR/Cas9 Genome-Editing Design

[0110] Target sites for single guide RNAs (sgRNAs) to cleave in introns 29 and 31 of zebrafish ush2a (NCBI accession XM_009293147.3) were identified with the online web tool CHOPCHOP. sgRNAs for which no off-target sites were predicted and which had the highest predicted efficiency score were selected for synthesis. Synthesis of sgRNAs was performed as described previously. In brief, templates for in vitro sgRNA transcription were generated by annealing a constant oligonucleotide encoding the reverse complement of the tracrRNA tail to a target-specific oligonucleotides containing the T7 promoter sequence (5′-TAATACGACTCACTATA-3′-SEQ ID NO: 17), the 20-base target sequence, and a region (5′-GTTTTAGAGCTAGAAATAGCAAG-3′-SEQ ID NO: 18) complementary to the constant oligonucleotide. Phusion™ High-Fidelity DNA Polymerase (#M0530L, New England Biolabs, Ipswich, MA, USA) was used to fill the ssDNA overhang after which the template was purified using the GenElute™ PCR clean-up kit (#NA1020-1KT, Sigma-Aldrich, St. Louis, MO, USA). The template was used for the in vitro transcription of the sgRNAs using the T7 MEGAshortscript™ Kit (#AM1354, Thermo Fisher Scientific, Waltham, MA, USA). Obtained transcripts were purified using the MEGAclear™ Transcription Clean-Up Kit (#AM1908, Thermo Fisher Scientific, Waltham, MA, USA). Oligonucleotides used for sgRNA synthesis are listed in Table 2.

TABLE 2
Oligonucleotide sequences used for sgRNA synthesis.

| Oligo Name | Sequence (5′ > 3′) | SEQ ID NO |
|---|---|---|
| constant oligo | AAAAGCACCGACTCGGTGCCACTTTTTCAAGTTGATAAC | 19 |
| | GGACTAGCCTTATTTTAACTTGCTATTTCTAGCTCTAAAA | |
| | C | |
| target-specific oligo | CCGCTAGCTAATACGACTCACTATAGGGTGAGAATCCA | 20 |
| 5′ ush2a^{Δexo30-31} | ATTGGGAGTTTTAGAGCTAGAAATAGCAAG | |
| target-specific oligo | CCGCTAGCTAATACGACTCACTATAGGGCTAAAAAGAA | 21 |
| 3′ ush2a^{Δexo30-31} | TTGATTGGTTTTAGAGCTAGAAATAGCAAG | |

T7 promoter sequence in bold. Gene specific region in italics. Overlapping regions of the constant and target-specific oligonucleotides are underlined.

### Microinjections

[0111] For the generation of the ush2a^{Δexon30-31} zebrafish (deposited as ush2a^{rmc21} in ZFIN), the 5′ sgRNA, 3′ sgRNA and commercial Alt-R® S.p. Cas9 Nuclease V3 (#1081059, IDT, Newark, NJ, USA) were co-injected. To avoid preferential in vivo binding of Cas9 to either sgRNA, individual sgRNA-Cas9 complexes were prepared and mixed together prior to injection. For this, the individual mixtures were incubated at 37° C. for 5 minutes after which they were combined. The final injection mix contained 80 ng/μl 3′ sgRNA, 80 ng/μl 5′ sgRNA, 800 ng/μl Cas9 protein, 0.2 M KCl and 0.05% phenol red. Injection needles (#TW120F-3, World Precision Instruments, Friedberg, Germany) were prepared using a micropipette puller (Model P-97, Sutter Instrument Company, Novato, CA, USA). Wild-type zebrafish embryos were collected after natural spawning and injected at the single cell stage with 1 nl of injection mixture using a Pneumatic PicoPump (#SYS-PV820, World Precision Instruments, Friedberg, Germany). After injection, embryos were raised at 28.5° C. in E3 embryo medium (5 mM NaCl, 0.17 mM KCl, 0.33 mM CaCl₂, and 0.33 mM MgSO₄) supplemented with 0.1% (v/v) methylene blue. At 1 day post fertilization (dpf), part of the injected embryos was analyzed for the presence of the anticipated exon deletion using genomic PCR analysis. The remainder of the injected embryos were raised to adulthood.

### Genotyping

[0112] Genomic DNA was extracted from whole larvae (1 dpf) or caudal fin tissue from adult zebrafish. Tissue was lysed in 25 μl (larvae) or 75 μl (fin tissue) lysis buffer (40 mM NaOH, 0.2 mM EDTA) at 95° C. for 20 minutes. The lysed samples were neutralized with 10% 1M TRIS-HCl (pH 7.5) and diluted 10 times with milli-Q water. 1 μl of diluted sample was used as a template in PCR reactions to amplify the zebrafish ush2a^{Δexon30-31} allele and the corresponding wild-type zebrafish ush2a allele. For PCR analysis, the Q5 High-Fidelity DNA Polymerase kit (#M0491L, New England Biolabs, Ipswich, MA, USA) was employed. All primer sequences are listed in Table 1 (SEQ ID NO 22-37). The presence or absence of the ush2a^{Δexon30-31} allele was confirmed by Sanger sequencing.

### Immunohistochemistry, Histology and Quantification of Fluorescent Signal Intensity

[0113] Zebrafish ush2a^{Δexon30-31}, ush2a^{rmc1} and strain-matched wild-type larvae (5 dpf) were cryoprotected with 10% sucrose in PBS for 10 minutes prior to embedding in OCT compound (Tissue-Tek, #4583, Sakura, Alphen aan den Rijn, The Netherlands). After embedding, samples were snap frozen in liquid nitrogen-cooled isopentane and sectioned following standard protocols. Cryosections (7 μm thickness along the lens/optic nerve axis) were rinsed with PBS, permeabilized for 20 minutes with 0.01% Tween-20 in PBS and blocked for 1 hour with blocking buffer (10% normal goat serum and 2% bovine serum albumin in PBS). Antibodies diluted in blocking buffer were incubated overnight at 4° C. Secondary antibodies were also diluted in blocking buffer and incubated together with DAPI (1:8000; D1306; Molecular Probes, Eugene, OR, USA) for 1 hour. Sections were post fixed with 4% paraformaldehyde for 10 minutes and mounted with Prolong Gold Anti-fade (P36930; Molecular Probes, Eugene, OR, USA). The following primary antibodies and dilutions were used: rabbit anti-usherin (1:500; #27640002, Novus Biologicals, Centennial, CO, USA), mouse anti-centrin (1:500; #04-1624, Millipore, Burlington, MA, USA) and rabbit anti-Adgrv1 (1:100; #DZ41033, Boster Bio, Pleasanton, CA, USA). Secondary antibodies (Alexa Fluor 568 goat anti-rabbit (#A11011, Thermo Fisher Scientific, Waltham, MA, USA) and Alexa Fluor 647 goat anti-mouse (#A21237, Thermo Fisher Scientific, Waltham, MA, USA)) were used in a 1:800 dilution. Images were taken using a Zeiss Axio Imager fluorescence microscope equipped with an AxioCam MRC5 camera (Zeiss, Jena, Germany). Quantification of the fluorescent signal intensity of anti-usherin and anti-Adgrv1 immunoreactivity was performed using Fiji version (v.) 1.47 software as described previously. Upon identification of the areas of the connecting cilia, the maximum and minimum gray value of usherin or Adgrv1 immunofluorescence in those areas was measured. The difference between those values was calculated for each individual photoreceptor cell after which the mean difference per retina was plotted. All data were analyzed using one-way ANOVA followed by Tukey's multiple comparison test. Statistical significance was set at p<0.05.

[0114] To assess rhodopsin localization in the larval retina, larvae (6 dpf) from homozygous ush2a^{Δexon30-31} ush2a^{rmc1} and strain-matched wild-type controls were sampled 100 minutes post light onset. Larvae were fixed in darkness overnight at 4° C. using 4% paraformaldehyde, dehydrated using methanol series with an ascending concentration, transferred to 100% methanol for an overnight incubation followed by storage at −20° C. Upon embedding, larvae were rehydrated in descending methanol series to 0.1% PBS-Tween-20. Afterwards, larvae were cryoprotected with 10% sucrose in 0.1% PBS-Tween-20 for 15 minutes, followed by an incubation in 30% sucrose in 0.1% PBS-Tween-20 for 1 hour at room temperature. Larvae were then embedded, snap frozen and sectioned as described above. Cryosections were rinsed with PBS, permeabilized for 2 minutes with 0.1% Tween-20 in PBS and, immersed in 10 mM Sodium Citrate at pH 8.5 and heated for 1 min at 121° C. in the autoclave. Cryosections were subsequently washed in 0.1% Tween-20 in PBS and blocked for 1 hour with blocking buffer (10% non-fat dry milk and 0.1% Tween-20 in PBS). Primary antibody (mouse anti-rhodopsin, 1:4000, #NBP2-59690, Novus Biologicals, Centennial, CO, USA) diluted in blocking buffer was incubated overnight at 4° C. Secondary antibody (Alexa Fluor 488 goat anti-mouse, 1:800, #A11029, Thermo Fisher Scientific, Waltham, MA, USA) was also diluted in blocking buffer and incubated together with DAPI (1:8000; #D1306; Thermo Fisher, Waltham, MA, USA) for 1.5 hour. Sections were mounted and images were taken as described above. Rhodopsin levels were quantified by manual counting. For this, all pictures were taken using the same settings after which the mislocalisation spots in the region of interest (outer nuclear layer), blinded and analyzed independently by two individuals. For all pictures mean counts were calculated and analyzed using a one-way ANOVA followed by Tukey's multiple comparison test. Statistical significance was set at p<0.05.

### Antisense Oligonucleotides

[0115] The sequence of USH2A exon 30 and 31 and the 50 bp upstream and downstream flanking intronic sequences were analyzed to identify potential ASO target sites as described previously (Slijkerman, R, Exon Skipping and Inclusion Therapies. 2018, Springer. p. 519-530). (FIG. 1). Briefly, the presence of exonic splice enhancer motifs was assessed using the ‘Human Splicing Finder’ website (www.umd.be/HSF3/; Date accessed: Dec. 16, 2020) and RNA structure and free energy predictions were performed using freely available database tools (www.unafold.org/; rna.urmc.rochester.edu/RNAstructureWeb/index.html). ASOs were designed to have a Tm≥48° C., a GC content between 40-60% and a length of 17-23 nt. Subsequently, for each targeted exon, the 2-5 most optimal ASOs were purchased from Eurogentec (Liège, Belgium) containing 2′-O-(2-methoxyethyl) modified ribose groups and a fully phosphorothioated backbone. The matching control ASOs all contain four mismatches relative to the target sequence. All ASOs were dissolved in phosphate-buffered saline (PBS) before use. ASO sequences are listed in Table 3.

TABLE 3
Antisense oligonucleotide sequences and characteristics.

| RNA oligonucleotide | Sequence (5′ > 3′) | Length (nt) | GC content (%) | SEQ ID NO |
|---|---|---|---|---|
| ASO_30_1 | CACUUUGUGGAGCUGUGAAGG | 21 | 52 | 13 |
| ASO_30_2 | GCUGUAUCCAUUUAAGCUGCG | 19 | 53 | 14 |
| ASO_31_1 | GUAGCAAGCCUGUCAAUAUGCC | 22 | 50 | 15 |
| ASO_31_2 | CUUCUUGUGGAGUAGAGAUGUU | 22 | 41 | 16 |
| mmASO_30_1 | CACUUUGUAUAACUGUUAAGG | 21 | 33 | 38 |
| mmASO_30_2 | GCUAUAUCCAUUUAAAAUACG | 19 | 47 | 39 |
| mmASO_31_2 | CUUAUUGUGUAUUAAAGAUGUU | 22 | 22 | 40 |

ASO: antisense oligonucleotide; mm: mismatch; nt: nucleotide; Mismatches with the target sequence are underlined. All ASO were ordered with 2′-O-(2-methoxyethyl) modified ribose groups and a fully phosphorothioated backbone.

### Minigene Vectors

[0116] The genomic region containing human USH2A exon 30 or USH2A exon 31, together with 300-1000 bp of flanking up- and downstream intronic sequence, was cloned into a pDONR201 vector using Gateway cloning technology. Primer sequences are listed in Table 2. The complete insert of the donor vector was sequence verified and subsequently cloned into the pCI-Neo-Rho destination vector, which enables the expression of the fragment of interest flanked by two rhodopsin exons. This resulted in 2 minigene vectors, either containing human USH2A exon 30 or USH2A exon 31 (FIG. 2).

### Cell Culture

[0117] HEK293T cells were cultured in Dulbecco's modified Eagle's medium (DMEM) (#D0819, Sigma-Aldrich, St. Louis, MO, USA) supplemented with 10% (v/v) fetal bovine serum (#F7524, Sigma-Aldrich, St. Louis, MO, USA), 1% penicillin-streptomycin (#P4333, Sigma-Aldrich, St. Louis, MO, USA) and 1% sodium pyruvate (#S8636, Sigma-Aldrich, St. Louis, MO, USA). Cells were passaged twice per week upon standard trypsinization (#DF0152-15-9, Thermo Fisher Scientific, Waltham, MA, USA). WERI-Rb-1 cells were cultured in RPMI-1640 (#22409-015, Gibco Waltham, MA, USA) supplemented with 15% (v/v) fetal bovine serum ((#F7524, Sigma-Aldrich, St. Louis, MO, USA), 2% HEPES (#H0887, Sigma-Aldrich, St. Louis, MO, USA) and 1% penicillin-streptomycin ((#P4333, Sigma-Aldrich, St. Louis, MO, USA). Cells were cultured in suspension and maintained by addition of fresh medium or replacement of medium every 3 to 4 days.

### Transfection of ASOs and Minigene Vectors in HEK293T Cells

[0118] HEK293T cells were seeded at a concentration of ˜0.2×10⁵ cells per well in a 24-well plate and grown for 24 hours at 37° C. in a total volume of 0.5 ml medium. Cells were (co-)transfected with 500 ng of the minigene vector and the indicated amount of ASO, calculated as the final concentration in the culture medium after ASO delivery. The transfection mixture furthermore contained 3 μl Fugene® HD Transfection Reagent (#E2311, Promega, Madison, WI, USA), and was prepared in a final volume of 50 μl Opti-Mem (#31985-047, Gibco Waltham, MA, USA), according to manufacturer's protocol. Two wells per condition were treated. After incubation for 24 hours at 37° C., cells were washed once with PBS and harvested for RNA isolation.

### Transfection of ASOs in WERI-Rb-1 Cells

[0119] Transfections were performed on adherend cells. For this purpose, all wells of a 12-well plate were coated with Poly-L-Lysine (#P4707, Sigma Aldrich, Saint Louis, MO, USA) by adding 0.5 ml Poly-L-Lysine to each well. After a 90-minute incubation at 37° C., Poly-L-Lysine was removed from the wells and wells were washed three times with PBS and air-dried for 30 minutes. Next, WERI-Rb-1 were seeded at a concentration of 1.0×10⁶ cells per well in a 12-well plate and incubated for 48 hours at 37° C. Cells were subsequently transfected with the ASO of interest using Lipofectamine™ 2000 transfection reagent (#11668019, Thermo Fisher Scientific, Waltham, MA, USA) at a 2:1 (volume:weight) ratio between Lipofectamine™ 2000 and ASO. First, individual Lipofectamine™ 2000/Opti-MEM (50 μl) mixtures and an ASO/Opti-MEM (50 μl) mixtures were prepared. Both mixtures were individually incubated at room temperature for 5 minutes. Next, the ASO and Lipofectamine™ mixtures were mixed together and incubated at room temperature for an additional 10 minutes before being added to the cells. After a 24 hour incubation at 37° C., cells were washed once with PBS and harvested for RNA isolation.

RNA Isolation and cDNA Synthesis

[0120] Total RNA was isolated from transfected HEK293T cells or WERI-Rb-1 cells using the Nucleospin RNA II isolation kit (#740955.250, MACHEREY-NAGEL, Düren, Germany), according to manufacturer's protocol whereas total RNA from zebrafish larvae (5 dpf) was extracted using the RNeasy® Micro kit (#74004, Qiagen, Hilden, Germany). For cDNA synthesis from HEK293T RNA, the iScript™ cDNA synthesis kit (#1708891, Bio-Rad, Hercules, CA, USA) was used with 0.5 μg total RNA as input. From WERI-Rb-1 and zebrafish RNA, cDNA was synthesized using SuperScript™ IV Reverse Transcriptase (#18090010, Thermo Fisher Scientific, Waltham, MA, USA), Oligo(dT)₁₂₋₁₈ primer (#18418012, Thermo Fisher Scientific, Waltham, MA, USA) and 0.1-0.3 μg total RNA, according to manufacturer's protocol.

### Transcript Analysis

[0121] For the exon skipping experiments using the minigene splice vectors, the target region was amplified from the synthesized cDNA using Taq polymerase (New England Biolabs, M0491L, Ipswich, MA) and a forward primer and reverse primer located in exons 3 and 5 of the human RHO gene, respectively. For the experiments in WERI-Rb-1 cells and zebrafish larvae, the target region was amplified from the synthesized human or zebrafish cDNA using Q5@ High-Fidelity DNA Polymerase (#M0491L, New England Biolabs, Ipswich, MA, USA). For the exon skipping experiments in HEK293T cells and WERI-Rb-1 cells, primers amplifying GAPDH using Taq polymerase (New England Biolabs, M0491L, Ipswich, MA) were employed as a control. All primer sequences are listed in Table 1 (SEQ ID NO: 22-37). Amplified fragments were separated on a 1% agarose gel and sequence-verified by Sanger sequencing.

### Results

### USH2A Exons 30-31 is a Promising Target for Exon Skipping

[0122] USH2A exons 30 and 31 (306 nucleotides) encode exactly one fibronectin type III (FN3) domain. In addition, numerous unique loss-of-function mutations have been reported in those exons, making important for mutation them targets exon skipping (USH2A LOVD database, databases.lovd.nl/shared/variants/USH2A/unique). Skipping this combination of exons will maintain the open reading frame of the USH2A transcript, and is predicted to result in the production of a slightly shortened usherin protein lacking exactly one FN3 domain (FIG. 3A). 3D homology modeling predicted human usherin^{Δexon30-31} and usherin^{Δexon39-40} to show a nearly identical protein domain structure in which folding of neighboring FN3 domains is not disturbed (FIG. 3B).

Generation of the ush2a^{Δexon30-31} Zebrafish Line Using CRISPR/Cas9 Technology

[0123] We and others have previously established the translational value of zebrafish models to study the retinal phenotype of Usher syndrome (Dona, M., et al. 2018. 173: p. 148-159, Dulla, K., et al, Molecular Therapy, 2021; Noel, N. C., I. M. MacDonald, and W. T. Allison, Biomolecules, 2021. 11 (1): p. 78). The human and zebrafish usherin protein share a similar protein domain architecture and an overall sequence identity of 52% (Dona et al, supra). The protein region encoded by zebrafish and human USH2A exons 30-31 shows a 61% sequence identity between human and zebrafish. Similar to the human situation, the in-frame deletion of zebrafish ush2a exons 30-31 is predicted to result in a shortened protein (usherin^{Δexon30-31}) from which exactly one FN3 domain is lost (FIG. 1A).

[0124] To assess the effects of dual exon skipping therapy on usherin protein function, we adopted CRISPR/Cas9 technology to generate a stable zebrafish line from which the genomic region encompassing ush2a exons 30-31 was specifically excised. For this, Cas9 protein and two sgRNAs, one targeting the genomic region upstream and one targeting the genomic region downstream of the exonic targets, were injected in fertilized embryos (FIG. 4A). Correct exon excision was confirmed by genomic PCR and Sanger sequencing. A stable homozygous zebrafish ush2a exons 30-31 excision lines was bred from a germline-positive founder fish, and designated ush2a^{Δexon30-31}. Homozygous ush2a^{Δexon30-31} fish were viable and did not display any abnormalities in overall body morphology, development, or swimming behavior.

[0125] To determine the effect of excision on transcriptional level, total RNA was isolated from pairs of homozygous ush2a^{Δexon30-31} larvae. RT-PCR analysis using a forward and reverse primer in respectively exons 28 and 33 of the zebrafish ush2a gene detected a shortened PCR fragment in the ush2a^{Δexon30-31} zebrafish in the absence of any clear alternatively spliced ush2a transcripts (FIG. 4B). Sanger sequencing confirmed the expression of the expected ush2a transcript exclusively lacking the anticipated target exons from the ush2a transcripts derived from the ush2a^{Δexon30-31} larvae.

Excision of ush2a Exons 30-31 Restores Usherin Protein Expression in Genetically Modified Zebrafish

[0126] To investigate whether the skipping of ush2a exons 30-31 resulted in the translation and correct localization of the usherin^{Δexon30-31} protein in photoreceptor cells, an immunohistochemical analysis of usherin expression was performed. In the wild-type zebrafish retina, usherin is expressed at the periciliary region of zebrafish photoreceptors (Dona, M., et supra; Dulla, K., supra). Antibodies directed against the intracellular region of the usherin protein and antibodies directed against the connecting cilium marker centrin were used to co-stain unfixed retinal cryosections of 5 dpf wild-type, ush2a^{rmc1} and ush2a^{Δexon30-31} zebrafish larvae (FIG. 5A). Anti-usherin immunoreactivity is absent in photoreceptors of ush2a^{rmc1} larvae. As hypothesized, the usherin^{Δexon30-31} protein localizes at the photoreceptor periciliary region, adjacent to the connecting cilium marker centrin, similar to full length usherin localization in strain- and age-matched wild-type larvae. The mean intensity of the anti-usherin fluorescence signals at all periciliary regions in the middle section of each eye, was quantified using an automated Fiji script. This analysis corroborated that skipping of ush2a exons 30-31 leads to a restoration in usherin protein levels (FIG. 5B; means, standard deviations and n-values are shown in Table 4). As also previously published, usherin immunoreactivity is significantly decreased in ush2a^{rmc1} mutants as compared to wild-type controls (Dulla, K., et al. supra). Skipping of exons 30-31 resulted in a restoration of normal anti-usherin fluorescent signal intensities.

TABLE 4
Means, standard deviations and n-values of anti-
usherin fluorescence signal quantification.

| Zebrafish line | Mean | Standard deviation | n |
|---|---|---|---|
| wild-type | 42.05 | 10.90 | 28 |
| ush2a^{rmc1} | 16.15 | 8.05 | 25 |
| ush2a^{Δexon30-31} | 45.77 | 11.50 | 28 |

n: number of zebrafish.

Skipping of ush2a Exons 30-31 does not Alter Adgrv1 Localization in Zebrafish Photoreceptors

[0127] The correct localization of the usherin^{Δexon30-31} protein indicates that the FN3 domain encoded by exons 30-31 can be missed without interfering with usherin expression and subcellular localization in zebrafish photoreceptors. As a next step, the influence of the excision of the target exons on the expression and localization of usherin interaction partners was analyzed. In humans, usherin and the other known USH2 proteins, whirlin and ADGRV1, form a dynamic protein complex (Yang, J., et al., PLOS genetics, 2010. 6 (5): p. e1000955; van Wijk, E., et al., Human molecular genetics, 2006. 15 (5): p. 751-765). We previously showed that defects of usherin led to a reduction in localization of the USH2 complex members, whirlin and Adgrv1, at the photoreceptor periciliary membrane of ush2a^{rmc1} zebrafish larvae. To analyze whether the excision of the target exons resulted in restoration of Adgrv1 expression in zebrafish photoreceptors, antibodies directed against the N-terminal region of Adgrv1 and antibodies directed against the connecting cilium marker centrin were used to co-stain unfixed retinal cryosections of 5 dpf wild-type, ush2a^{rmc1} and ush2a^{Δexon30-31} zebrafish larvae (FIG. 6A). Anti-Adgrv1 immunoreactivity is indeed absent in photoreceptors of ush2a^{rmc1} larvae and, as hypothesized, the usherin^{Δexon30-31} protein is able to restore Adgrv1 protein expression at the photoreceptor periciliary region. The mean intensity of the anti-Adgrv1 fluorescence signals at all periciliary regions in the middle section of each eye, was quantified using an automated Fiji script. As previously published, Adgrv1 immunoreactivity is significantly decreased in photoreceptors of ush2a^{rmc1} mutants as compared to wild-type controls (FIG. 6B) (Dona, M., et al., 2018. 173: p. 148-159). Skipping of exons 30 and 31 resulted in a restoration of normal anti-Adgrv1 fluorescent signal intensities. This suggests that, similar to native usherin, the usherin^{Δexon30-31} protein is able to scaffold the USH2 protein network in the periciliary region.

Skipping of ush2a Exons 30-31 Restores Rhodopsin Trafficking in Genetically Modified Zebrafish

[0128] Loss of usherin function was previously shown to lead to defective rhodopsin transport from the inner segment to the outer segment of photoreceptors (Toms, M., et al., Human molecular genetics, 2020. 29 (11): p. 1882-1899). We therefore investigated if skipping of ush2a exons 30-31 is able to restore rhodopsin trafficking. In the retinas of 6dpf wild-type larvae, rhodopsin is present in the outer segments (FIG. 7A). In line with Toms et al supra, cells in which rhodopsin was partially localized to the inner segments of photoreceptor cells were occasionally observed in wild-types. In retinas of ush2a^{rmc1} larvae, the amount of cells per retinal section was significantly increased (P<0.05; one way ANOVA followed by Tukey's multiple comparison test). Quantification of number of cells with rhodopsin immunoreactivity in the inner segments revealed a significant reduction of rhodopsin localization in the outer nuclear layer of the ush2a^{Δexon30-31} larvae as compared to ush2a^{rmc1} larvae (P<0.05; one way ANOVA followed by Tukey's multiple comparison test), while those levels were comparable to levels in retinas of wild-type larvae (FIG. 7B; means, standard deviations and n-values are shown in Table 5). This suggests that the usherin^{Δexon30-31} protein is able to support normal ciliary trafficking of rhodopsin to the photoreceptor outer segment.

TABLE 5
Means, standard deviations and n-values for the quantification
of rhodopsin localization in the outer nuclear layer.

| Zebrafish line | Mean | Standard deviation | n |
|---|---|---|---|
| wild-type | 7.82 | 8.54 | 14 |
| ush2a^{rmc1} | 16.25 | 8.96 | 12 |
| ush2a^{Δexon30-31} | 7.04 | 6.88 | 13 |

### Identification of Splice Modulating Antisense Oligonucleotides

[0129] Based on the ability of usherin^{Δexon30-31} to properly localize in photoreceptors and restore USH2 protein complex formation and rhodopsin trafficking, we aimed to design and in vitro validate ASOs that specifically induce combined skipping of exon 30 and 31 from USH2A pre-mRNA. For each exon of interest, 2-5 ASOs were designed to target either the intron-exon boundaries, or exonic splicing enhancer (ESE) motifs within the exons. With the use of in silico analysis, parameters for (lack of) secondary structure formation, thermodynamic properties, and sequence selectivity were taken into account to minimize potential off-target effects. As a non-binding control, mismatch ASOs (mmASO) were used that contained four mismatches relative to the target sequence. All ASOs contain 2′-O-(2-methoxyethyl) modified ribose groups and a fully phosphorothioated backbone. To swiftly identify the most potent ASO for each of the target exons, the designed ASOs were co-transfected with the minigene vector in HEK293T cells at a 250 nM concentration, and screened for their potential to induce exon skipping by RT-PCR (data not shown). Because the genomic region spanning USH2A exon 30 and USH2A exon 31 (˜22 kb) exceeds the practical limitations of Gateway cloning technology, individual vectors with either USH2A exon 30 and flanking sequence, or USH2A exon 31 and flanking sequence, were used in these experiments. For USH2A exon 31, we identified two ASO that showed high exon skipping potential in the minigene splice assays (FIG. 8). Simultaneous transfection of two ASOs directed against different parts of USH2A exon 30 showed even more satisfactory exon skipping (FIG. 9). ASOs with highest exon skipping potential as proven in the minigene splice assays, and their accompanied non-binding controls, are listed in Table 3.

### Antisense Oligonucleotides Induce a Concentration-Dependent Increase of Exon Skipping in Minigene Splice Assays

[0130] After identifying ASOs with high exon skipping potential in the initial ASO potency screen, we lowered ASO concentrations in order to provide pharmacodynamic proof of concept for ASO-induced exon skipping. As shown in FIG. 10, for both ASOs (or in case of exon 30, combination of ASOs), we observed a dose-dependent increase in exon skipped transcripts with increasing concentrations of ASO. To exclude non-sequence specific ASO-induced effects or transfection reagents-induced effects on splicing, we co-transfected the minigene vector with the mmASO. In none of the cases, the mmASO was able to induce splice modulation. All exon-exon boundaries of the amplicons were sequence verified.

### Antisense Oligonucleotides Induce Dual Exon Skipping in WERI-RB1 Cells

[0131] The retinoblastoma-derived WERI-Rb-1 cell line (McFall, R. C., T. W. Sery, and M. Makadon, Cancer research, 1977. 37 (4): p. 1003-10) was obtained in order to evaluate dual exon skipping potential of the identified ASOs on endogenously expressed USH2A. USH2A transcripts were analyzed by RT-PCR using primers in exon 28 and exon 33. Co-transfection of WERI-Rb-1 cells with selected ASOs targeting exon 30 and exon 31 in a 1:1 ratio for each therapeutic target (25 nM ASO_30A, 25 nM ASO_30E and 50 nM ASO_31B) resulted in the anticipated dual exon skipping effect (FIG. 11). Co-transfection of WERI-Rb-1 cells with these ASOs also resulted in a faint smaller splice product, which has been verified by sequencing as transcript in which not only the target exons are skipped, but also exon 32 (data not shown).

The application's sequence listing, which the Patent Office published only in electronic form, follows.

SEQUENCE LISTING (40 sequences)

SEQ ID NO: 1 - DNA, 800503 bp, Homo sapiens
  source 1..800503: mol_type = other DNA; note = USH2A genomic DNA wild-type
tgtttgctctgcagaatactttacctgggcacccaagtcttccttccagcattcctgctgctacagcctatttgctgagtaaccaggggttacagcagcgttgccaggcaacgagggacagcggtcctgttgaagagccatttgtcacactgaggggactggttgaaatgcaataaagaaatggtaactcagcttatttatcaatacaattacttgcacagtattagggatccatgtgtaacctacaaattcatagtcatatgaggaaacacagaaacattttgctaaatattaaagcataggacagacagatggtgttgggtttctaatcagctttactctgagcttaaagttgctgcacatgctgggataaggggaaaggcccaaagtcctttgccagctttattttgggcatctgtaagttagctctgggttacaatgtacagtgcatgtgtaaagaaaatctacaagattcttttccctgttaagtagagctggtaatgccattgctaattccctggggtgaagtaacaacacaaaattattgtatgtgtaatatattattaataattatatatatataaaacacacacatatattatataaatatttatgtataactggttataaatattactggttgtcctgtggacttataaagtgcttgatttgcccaatgcaatcaagagatttaccaaaaggatgagtattttactctgagcactgtgcttcaaaatgttttttgagaagttcagtagtgttgcttctaggagctcaaagtcctcaggcctgggatgagcttcagttttaaaggtgcagcagctttcccttgacgccctacgtttttgattcccagataccagcagctactcatgtcttcgccattgctaagaacgtcgttggtattaccttactctgagaacgtgtctgcagtttccagaaaatggagtatcgcaacatcacttaaagtaccctgcttcaaagtattgctggcaagtggcgtgggcctgattatttatttagaaatgctttatcaggaggagaatgcttttttgtaaacatgaattgcccagttctttcattgggctctggcttcttgtttcaggtcattgaaatgttgatctttgcctattttgcttcaatatccttgactgagtcacgaggtcttttcccaaggctggagaacgtgggagctttcaagaaagtttccatcgtgccaacccaagcagtatgtggactcccagaccgaagcactttttgtcacagctctgctgctgctgaaagtattcagttctgtacccagcggttttgtattcaggattgcccatacagatcttcacaccctacctacactgcccttttctcagcaggcctcagtagctgcatcacaccagacaagaatgatctgcatcctaacgcccatagcaattctgcaagttttatttttggaaatcacaagagctgcttttcttctcctccttctccaaagctgatggcatcatttaccttagctgtatggctgaaacctgagcaacaaggtgtaatgtaagtagtagtgtaggtataagctttcataggtccccaaaaccagtagtagtgaagatcatttcagcctgaattccaaaccggaagtgaaggctatatagaattcatggtattgaagactaactcttccagttgtttccccaattaaaatttttttctcttctatggatgaaatggaccatgaaaaaaaatgtgaaaatagtttatcaaaggcaaatgtgtttatgcaggaatcatttattttctatagcttagcgcgacctttggtcttagccttcaaagcctaaagaagactcagagtgagttttaaggcatggaaacttgtaattaatacaaataattaatattttcaaaatcttgaactgggtttatataatcaacatttccttactagggtataacattttcattaggcagatagttctcccagtccttgggactgttttcttcatcctcgtttccccaagaagagctgtttgtttgactcatggaagatgttcagtaatataaattgaatatataaataaccctccatctctaaaaacatatagcttttagttctttatcttgtggtattttcattttccaattagttaggaaatatgtaggtaagtgtgagagattctcaaaagctttcatgctgttcatcccagagaaatgccttcaatgagtctgggtcttattactgccattttttgttatttaatcaccagtttttcattctgtaatcttttctcaagctgatatctaatgagtttcttctaaatatttattgccaacctggagattttaatatacaggacagttttgaggaatttttgcttatcttttttcttcctagagggcttttggccctttctcttgtgacattttctgtgtgtgacagcgttggctggatatctaaaaacttgtgaaacaaaccagaaaaggattacaatctcataagcaaataggacttaaatgtttttggtgtttagtttcaatttgccaagtgaaagttggcatgtcttcattttgttttaaatttggattaatcacaaaattaatcacaaaccattcccatttctacatctctcctcaaagaaaaccttgttttcttactgtttgaaattctagtaaattcaagctactcagtttatataattaacatctgaagagtcttaaaacattgtcttttgacaaatagggctaagataaaatatccttctgagcttgtagggacatatctgtaccaaattcatcttctattgacatcattttgtataaataagacagagaagtatttacagggttggaagaacatggttaatggttttgagagttccttgtatcaaggtcgtttccattttcaaaattaaaatacctttgggaattgggggaatttcggggtgtttgcactagataagtaaaacaaacaaaacatggattatccaattattgtttattcaggagcagaataaatccagttcctaaatattttgctacctgccttcctctcacatttattatctaccaaagctagtatgtttacaagcaaacaaaatagcaaggaagataatcaataacatattaagaaatgcattttcagtaagcttgggaaaataagtctgcatttggtaaatacattcttgagtaatggtcgaattctcacttgtagatttaaacagaagaaaaatgaataggggcaaactcttttcaggttaagacctgatgggtagggataaaaacaaattcacttcagtaaattagaaatattcaactactgaagggttaaaaatataatttgcagtagaatttatataaaacttttatttctacttatataaaacctttatgtcatctaaatctatttgcctaaattaaaaatatacttgcactcataactttataccaaatatacatacaaaatatagtaaaattgtgacagtaaatgagggactattagtgttttacaatcttattcttacctcccaactcaggaaaaaaatagatgcaagtgatagatgcaagtgagaagaaattatgtgtgaaaaacatgccctttaaggaaagctttaaaccatctttagcagtaattcttgattggctcaattttatacatttgcctctctgatacttcctaccaaatttgatcacaaactcatcattttttgagagactactgtatcctaggtgtttgtgtgtgtatcctcagaatactcatgatctaaatgatctaatggagtgtacagatggatgagtgttattacctaggcagcacagtgtgttaagtgagcacaaagtgagacccctcaaccgaccctgagcaggaagaagggtgccaggaccaagcataatcattcagataccaaagctaagtaggaggtaaccaggtgaagaagagacctcaaggtctgaaaggtgtgtcactctaataagggtagagataacttaaaataatttgataactgccctgacacaagacctggaagttttctgaaaactcttctagtttttcaaaatcttatttcactgtgttctagaaggctgaaggacctttcacctcagatatttaacatgatctcagtacctcagttggactgtacggtcatggagaggtagccagtcatcttacagacactggctttggctttgtgccagttgatgatggggtgagtagagactatagctgtccattcttcatttcaccatgggaattaaatagagtgattctgacttcagggctaccaatttagagccttccatggacactaaatttgctttacattaaaaaaaaatttttgcactgatgacttaatactcaagcggcctgtagtgtgttgtaccacttcctctaaaagaaatagcaggagaactaatgagccaataacctaaatgttagttttgcagaatgattcaaccactttagtttccatcatgaatctctaatgaagggtgctgaggctctggggaatatattgtaaataagaattctattttttattgaaataaaggggcttcttcattggaataaagctttcattgaatataatgacattcaggcacttattcatagtacaccattttgagcaaagtttgaggtcattttaacaccactgtaactgcacaataccttagcatgtctttttggttggatgctgaccttttctctcttttccggttgcttcctaaggtgtgttatagaaaagacagtagatgggcagattgtgttcaaacttacaatatctgagaaagagaccatgttttattatcgcacagtaaatggtttgcaacctccaataaaagtaatgacactggggagaattcttgtgaagaaatggattcatcttagtgtgcaggtgagtaaaataaaaaatatttaacatttggttaaacacaaggatttgtcttcctttctctcttttaaatggcatctactcacaaaatctgcagcagtatcttttagatttcaggtgtgtataaatgacaactaaagaagaaaaatatttaaatgacctaatgatgtatctcttgatatactagcatttcctcccccaaaattgctgtaaaagctctcacagaaacttaaagacaatgctatctgtaattgtaatatcctcagaaaatttttgttttcttgggttcgtatattctattttgtttaaaaatgtgtaagggctcatttgatgtctggtactaattttactagtcatggatgtattaataccccagcttgatttttacatctgtctttctcagcagctgatgatgtgaataaaatttgtctgttgcattaaaatggtgaccttagaactaatgaactttacacttgaggcactcaaaaggtgttatattattattttagttgtcaaccacagtttgtatgagccttagaagctgctaaaggctgagagagctgtgacatgtctggtatttacagtctccagaagagaggcacagttcatccttttgttttttcagggcactggaatggcccaatacagttaaagccacacctgcctttcaaaccaggtgtattagtccattcttccactactataaaaaataccggagactgggtaatttattataaagaaaagaggttcaattggctcatggttctgtgggctatacaggaagcatgattctggcatctgctcagcttctggggagaccttagaaaacttacaatcacggcagcagacaaaggctgagcaagcacttcatgtggccagaatagggaggaaaagaaagaaagggaggtacttcacacttttaaaccaccagatctcatgagaattctatcaggagactagcactaggtggatggtgttaaagtactgatgagaaaacgtctacatgttccaataacctcccatcaggccccaccaccaaagctggggattacaattggacatgaggtttgggtggggacacagagccaaatcatgtaacttggggtgctgggtaccacagtttccagtatgagctctcatatgagcatccatccagtggctcatgtgaacctcatttgaactagaggacatttacatccttgttcattttataaaaattatctttgatttctcacttttttttttttttttaatcttgaagcagataatgagtgtgcgtcctcagagggtcttgataattgttcattgttttggctttcagatactaagatatgagtttagcaaatgtgattggcaggggtcagagttttcatacacaactagggttgaaatgatacacaaaggggacgtcatgtctgacgtcaagccttgtgcataggacatgatggtttctgattctcaatgcttattctccatgtgttcagtagttaacagataggagaccaatttgtcctagtcttgaagtttccattgtcttgaagtctccattctgcccactgaccagtcctacagaattgggttttaatattaaaaacgtagaaatagaaacttttaaagacagtgccatctttgcagaagatgccaaatagatatgtttgttgcatatttttgtatcaacaatgacaaaaaaattatctttacttgcctttattttgtgttatctgtgaaactgtgccatgttttggcaggcagtagtacattaaaagcttcacaaagaaagtttaaaatctaaatgcagagcggtaaccatgactgaattactcccttggggataaaatgctcttagagtgcctactgaaatcagcattatcatttcaatacatgtcaaatatgagtcatttactagtttaggcaaaatttcttcatgaatctttaaatctttctcttctttcaagaaaaggttaaagtacttatgatttaatgagactgctttatttcataactgtttgactatcaagagaaaacttgtccttttcgatttgtacactcttttatttatttttttgcataagttttaaactattctgcattttatattaaaactacagaactaggcagtcacaaaatgttagaaaaccattcagatctgtcatttaatcatctagcacttattaaatatttgaggggtatgcagcattatgggaatctggatttattcaaatgaaaattaaagagcaattatttactctaaaatggagctctatataaggttcctttatattggacaacagtctgaatatgtttaaggtattatgaaatttataaaaatccatattatagatttttttttgagacagagtttctcccttgttgcccaggctggagtgcaatggcatgatcttggctcactgcaacctccgtctcctgagttcaagagattatcctgcctcagcctcccaagtagctgagattacaggtgcctacaaccacactggctaattttttgtatttttagtagagaaggagtttcaccattgttggccaggctggtctcgaattcctgacctcaggtgatccacctgccttggcctcccaaagtgatggtattacaggcatgagccagagtgcccagcctagattttgaaaaaggaatgtactgattactcaaaagttgttataagaaataatggaggccaggcgcagtggttcatgcctgtaatcccagcattttgggaggtagaagtgaacggatagctcgaaccaggagttcgaggccagcctgggcaacatggcaaaacctcatctctacgaaaaaacaccctaaaaaaattagccaggtgtgatggtgcgtgtctgtagacccagctactcaggaggttggggctaaagtgaaaagatcacctaagcctggaagtcaaggcttcagtgacccatgatcatgccactgcattccagcctgggcgaaagagcaagatcctgtctgaaaaaaaaaaaaaaaaaaaaaaaaagtgacaggaaggacaggagattaggagttgggaaatctgatttaggttatgctactctgtagtcttaagaataaaatttataggaatccatatgatagttgtttaataaggaatgtactaattgcttaaacgttgttataagaagtaatggaagctgggcacagtggctcacacctataccctgcccgccttgacgtctcaaactgagtcatttgactcagttttcctatttacataagaagattgaactagatgaacaaaatgagggccttttgaattcttcataaacaagtaagtggagtgtggagtgtagcacaagtcattaaagtatggcaagctgttgagttgtgtagggttatttaggtagtaagtgacagagccagccccattaaccaatgatcagtcttgtgctttttttctcttctcccatgctgcttggcatttacataaaaacatttttttgctagattttctggacaaaatatagagaaatgtagattgttactattccattgtataactgcaagaacatttccagaaaaaatattttagtataaaatgtaacttactgttgcatgattatataatgcatctaaactccatttaatttggggattagggacttttatcatgctgggcataggacagaacaaatgattaataatcttgtttagtcaagtttcaaactacaaacctgcactttatgtatatgtggattttcacccatcttccaaatggccacaaattgatgaatttatatagtgtgtgtgtttctgtgcatgtgaaaaaataaaacatacaactctattcgtggaatggcccagaaaccagaattttagttcgttgcttatagtgattttttactggttagcttatacctggtggcataaaattaattagcagatctcaacttatgctttatctcagacagttcacttgtatcagctttccatcagtaaaatcagaattctaatttaccaaaatcagaaaaaaaattattttaaataattaaatatctgggggaaaagatgtcaggaaatccagacataccaaaattggaaatcgaatttcctaaacaaacaaatagacaatatgctcaatattgctatggtaatgaatctcacagcttttattccaaaactagcattttaaagtgtcaatctgttggaaaatgattagtgtttaaattaatattcatttatggacttgaatctgacaggattgccaattgaaattttactttggggtttaatatattggctatttcaaattatatcaagctaaaattcattgtgtcattttttatactaaaactagaaaaaatcaattcatagtttttattatcatatagggaacactgatcatattagcaaaatttttaaagcttagttttcatattaaatcagcacatgctgtagttataagatttcctttggttactcttataaaagttttgaaatatgtaaaaaaatttactttagcatttcgttatggattggtaggtaaaacaatatggaaataagtatatgtgtttagtggcatttcatttaaaagtaaaactttagggttttctttgacaatatattttgccttaagcagttccacacattttatagcccaaatagtgtcaaagaatcatcagtatagtcatccttctagtaattatgcagaattgcagtaaaacaattactacgatttgaagctgatgaaatactacagctgtggaaccaagaaatgatttagcattgggcttgttcacattttctatgctattttcagggctccttgatacattgacaattcaagagccatagatgactctagctacaatagtgtgaaaaagagcagttctaatatgatacaatgaagaaaaaaatgcatgggtaaataaagttttaggaatcaatatatgaaggataggagtttcataatcacagttcatgaagtatgctcttttgatttatgtattcaatctaagaaagaaaaactattgatagttctggaggaaaacaaaatgcaatttaaccaacatttgttagaatagataaaccaagtctctcaattaatctctgaactgtatgcccatgtgcacactttataaaggtgtttccatgttcctattgattgagggaacataaaacatccatgtcaccttatggaagcctcctcattcagttcagtaagctttatggcatagaattgtcataggaataccatcccagccccactcccattctaagagaatctcaacccatattatttctttaatatatcattgcatttagctctgactctgtgtgtgtgtgtatgtgtgtgtaagtatgcatgcatatgtgtgctaaatgtttctttgtgcaaagccttctctttatatctagccagctgggttaacagctcaagttagttgaatagttttgggttattcaaaataaattaagatcaatagaatataatgaagtttttcagaacaatcagttacaaattatcatagctgctattaatcattgatttatgtgcactatattaaacatgttacatatttgcagttatacaatgaaatagtgacatgcttgtaacatgtttaatatagtgttaataatagctctgtgccactgacttatattatctccatgacagagattttaaaaaattagccttaggaaatttaaactacctgcctacatttatagtcccaagcttctctgaccttaaactaaaagtaataacttgccatgaacatgggtcactgagcagatctaaataatagtttttaaaattctccaaaccaaaaaaaaaaggcacagaatcccaaaagaactgaaaacatatatttataatgtaaatataattttgtatatttatacatatttgtaatataaatattttcaatgcttcagatatttacatgatttatacaaataattaaagtcaatatattttttaactatacccctcattgatacaagcaatttaaatgtacaacagaatgtaattttgtataaagttctgcgcaatattttcatgttttatggcagttgcgatagactacaatggcttaaagaaagaatatttcccttaagccagcctgatcacctgacccatgccttatagaatcaacccttattacaataaaatacaaagaaggaagcacttcctactttattatggaagaggtaaaaccatccaagtaaaaaagtaattattctctgtacgttttttgcatgtgattttaaaatgcaatatttaagcagaaggcaaggctttaattcttgaccttttagtaaaaaattgtgcaaccctgggaaaactatgtaactcctcaaaatgttaggatacccattacaaattggaaacaaacaaacttggcctatttagcttacaccataaatttgaacatataaagaaaatattgtctactaaaacactttatagcctataacttcctgctatgaaggagcttacagtctcttcagaggataagcaatcaaataattacacaaataaaggcaaaattataattgtggtaagtgctacatgatcacatgaagaatgatttggtcaaaccactgaagtcaagaaaagcttccttgagtaaatgttattgaatatgtgtattagttttctaggcctgtactaaaaaattatcacaaactggtggcttaacacaacagttaattcattgttgaagagttctggaggctagaaagctgaaatcaagttgttagaagggccatgctctttctgaaacctctagaatccttccttgtctcttccagcatctggtgtttgcacagacaccagagtatgtgattgtgctacctcctggggtttgtctgcccacagcaaggccgggaacccagaaaagaaaagaggagtgcccagtgtagccaccacccactgcatgagaaacagagctggcagcaatccttgatgctccttagcttgtagctacatcactccagcctctgtctgcattatcatatggtcctctcctctgatcgtgtgtgtcttctcttcttataaggacatcagttgtactggattaggattcttcctaattcggtaggactcatcttaacaattacatccaaaaagacactacccaaataaggtcagagtcacaggcacatagggttagggcttcagtatgacttttgatgggacacagttcaactgatagtaagatttattcaaaagaatgcataggatccaactgggcaaagagaattgataagaacattccataaatgcatagcaaatagtgtaaatgcccttgtataaaaagaaatatgttacatagactaaaaaaccaaagtggttagagtgtcgctggcaaagtgggacatggtgtgaaatgaggacagaacagtaggaagaggctatgtgttaaagagaatcactggatatgttaagattttttttttaaatggaactctattgaactgttttatgtgaaggacaggagatgagggatgaggataaggaaggaaaacgtatgatatgcacagattattttttcctaaagatcactttggctgcagtgagggagaatggtttgcttgaagacaagtgtgaagggttgttatggtattttcatggaccaagtcagatgtaagtgttacttacttacagcatgaagacaatagtgaatatgcaaatgaatggtcagctttgagaggagtttaagaattaaattaaagggcttgttgatgaaggaatatgtaatatgagggaaagggagttgatgaatcccagctttctggcttatgtaattgcaggtacagtgatttctttttctcaaatagaaatactggaagagaatcagattttggatgtggagcacatatgaattagattccagtttagggtaataattctcaactatagaaattattagcattattgagaaactttaaaaaatattctgatgtccatatccctttatgtcttcattggtctaggtggggcgcaggcattatttctttctttcttccttccctgatggatttaaaaaggtgtaacaaaagaaaatatcagtctaccattgatgagcatttaggttggttccatatctttgctattgtgaacagtgctgcaacgaatatacatgtgcatgcgtctttatgatagaatgactcagattcctttggatatatacgcaggaatggaattgctgggtataatggtagttctgttttttttggtctttgaggaattgtcacactgttttctgtaatggttgaagtaatttacactcccaacatcagcctattaagcattcctttttctctgcaacctcactagcactgttgtttcttgactttttaataacagacattctgactgatgtgagatggtatctttcattgtggttttgattgacattgctctgatgatcagcgatcatatgcttgttggccacatgtatgtcttcttttgaaaagggtctatttatgtcctttgcccactttttaatagggttgtttttttcttgtagatttgttgaagtttgttatagaggccagctatcagacctttgccagatgtatagtttgcaaaacttttctctcactctataggttatctgttcactctgttgatagttcgttttgctgtgcagaagctctttaatttaatttgatcccatttgtcattgcttttggcatctctgtcgtgaaatctttgcctgttcctatttcctatgtccagaatgctattgcctagattgtctttcaggcttttagttttgggttttacgtttaagtctttattccaacttgagttgatttttatatatggtataaggaaggggtccagtttcaatcttctgcatatggctagccagttatcccaacatttattgaatagggagtcctttccccattgcttgtttttgtcagctttctcaaagatcagatggtggtaggtgtgatggccttatttctgggctctctattctttttcttcggtctatgtgtctgtttttgtaccagattcatgctgttttgcttactgtagccctgtagtatagtttgcagtcaagtaatgcaatgcctccacctttgttatttttgtgtaggattctctgtctatttgggctcatttttggttttatatgaatttaaaaagtttttttctagttattccaagaatgtcgttgtttgtttgatagaaatagcactgaatctgtaaattgctttgggcaatatggccattttaacgatattggtccttcctattcatgagcatggaatgtcacacaaaccaatgatatctgtttgtgtcatctctgatttatttgagcagtgctttgcatttctcattgtacagatctttcccctccctggttaactgtattcctggtattttattctttttgtggcgattgtttcacctgcttctaatcaaatctatttagtagctgttattaaactgtgtagccattagtatacagtagtactccattacccttggctttgctttctgttgtttgtcacccacagtcaaccacagtctgaaaatatcaaatggaaaatttcagaagtaaacaattcataagttttaaattgggtgctgttctgtgtagtgtgatgacatgtgaggtggtcaccatacctcctgcctgggaggtgaagcatccctttgtccagcagcttctccatattgtctatgctcctagcccttcagtcacatagtagctctcttagtaatcagatcagctgttgctgtatcacagttgtaacttgtgttcaaggaaactgtatttcacttcttaatggccccaaagtgcaataatagtaatgctggcaatttggctatgccaagaagccataaagtccctcttttaagtgaaaaggtaaacactctcaacttaacaaatgaaagagaaaagatcatatgctgaaattactaagaacttcagtgtaagaatgtatcttctgtccatgaaattctgaacaatgtattgttataattattctattttgatagttattgttaatctcttactgggcctaatttataaaaattaaactttatcttgggtatgtatgtataggaaaaaacatagcatatattgggttcagtaatatccacggtttcaggcattcactgggagtcttgcaacatatcctcaatggataaagggggactactgtatgcgcaatatatgtatacgcttaaaaagagttttgtttagctagtgtgtgtaagaagattatcacaagtcacactgtagtgtttgccttttgccagtctgaatgttatcatcagtctaatattttatagcaaagatttaagttcattgaaaacttccctatggaaacacttccaatcaagacctacagcaagccatgaataaattaacatttaaacatgaaaactgatatttgaagaagaattagcaattaataatttctgctagaaaatggtggtttctcagccaatagctataaattgtataatatatgtaaaaggaaatatatacaaatatcatatgggacatatatcacatatactactaaaattgaaaattgctataaatagaagactatgttccaatgtccactgatttttttttttttaacaatctctagtcttgaaaatgccactatggtaattctgtcaaatttgtaatggttgggatttgatggtagtgcttttgaaacctgtattatctaatggaattgtcatttatattatatcattttcacctaaaagccaaatacaataagacttaaattatttttgctttttttgtggatagtcatttttgtgcccaaagggctaactgatgccttcagttatacatgaacaattcgcactaacgtcaggaagaacagtgtgcatataacctagggcagaatttggtctatggaatgtatcactcagtagtggaatggagattatgactttatttaaacatggacttgagtagttttatttttccttactgtttcccttggcatttctttctctaaagtgcaacattcaaaagtattctatgcagctgtagtgtcctggatgcataataagggcatatgttcaaggcaagtttaaatatccacataagccaaagacagagtaattaacattaaaaaaattaagacaacttttccaagaatgaaaagctttaatagattagctaattttagaattatttaacaacaactgtgaaaaattattagtatttacaaatatgtatatataaatatatgtaatgtcttatgttagacagcaatttcattctgctctctaatgattacatgacatacttctgaaaaaagtcaaacagtgtgttctagaaggacaaagaaataattggttcagttttgcttatacttagtgttcaattgttatcaacctggggtgggaggaagggaaagaaagagggaaggacagaagagagcaagaaaagaaggaaggaggagaggaaggagagatggaagtcatgtgacatagctagggatttggggcaaaattcaagacccatgttttccttgatggaaagccaaggaacctgagaaggagagtcagcccatgccaatttcactgtggtagaggtgaccaagaaagtttacattatggatgtatagtaggtaattttaggttgtttttgtctgggatataaacccattgtgttattccagttatttggccaaaatgttccatgcaaccattttggagtgctagcactttagggaatttataaaaaggggtggtgttcagtgtctgggttgaatacaaggtaggtagaaaaggacaatcaaaggaattagctgcaaatgagatgaaatctatgggaacatatattgagaaaactagtgaccattataatttaatcctctgaaatacctgcaacaatctgagaacaaggtaggtggcaagatgcatttataaatattaaagaaacacaagaccccatacactttgaaaactggggagtaccgaacttggagaggtctagtataggtagtgcttgttggtttgcatatttttaaaaccactttattgaggtctgattgacatagaaaagtctgtccatgttgcatgtatgcaacttaatgagtctaaagataaatatatgcccatgaaagtatcaccataatctgtggcataaacatatccacctatttgtttattcttaattaaactttttcctgagataattgtaggttcacaggcacttgtgagaaataatacagaagtcccatgtaccctttactcatttgttctcatcagtaacatcttttataactatggtacaatattacgaccaggatatggacattaatataaccaatattattcacatttcccatttttcatatattcctatgtgtatatgtttagatccatatgattttattaaaattttatccaccacagccgagttgcagaaaagttccatccctacaaggacacctcaagctgcctttttataaccatgcccactgtctcccttcccctactgctgccacaggtgtccctaacttctggcaaccactcacttgtactctatttctaaaatttggtcttttcaaaatgttgtatacatgacatcacacaatatgtactcttttgggattgtttctttcttttttactcaacataattccgtggggattcattcaagttgttaagggcattgatagtccaccttattgcagcatagcattccacggtatgtgggtaccatggtttgtttaacccttcacccattgaaggacatctaggttaattctagttttgggttgtatcaaacacagttaaagcattcgtgtggatgtttttgttaacatacatattcgtttctctggaataaatgctcaagagtgcaatagcgtatggcagttgcatgtgtgtgttttaagaaactcatttccagagtggctgttccattttagaatcccaccagtgatgtatgagtgctccagattgtgcacatcctttgtagcatttaaaataaaggctacatttattttactatttaaaataacattttagccattctgatagataatatatcactgtggttttattttgcatttctttaatgactaatggtgttcagcatattttcatgtgcttatttaccattcatatgtccaattcggtgatgtctccccatgtcttctgcccattttctaatttgattgcttatttgtagcttgctgtttttattctttttacagggttttgctgagattgattaggtccaatttatcaatctttcctcttatgtattgtgttttccatgtcaagtctatgaagtcttgcctaaccctaaatcctgagtattttttctaaaagattttttttattttatattgttaaatttaagtatgtgtttcaggccaggcatggtggctcatgcctgtaatccccacacgtcaggatgctgaggtgggtgaattgcttgagcccaggacttcgagaccagcctgggcaccttgtctttacgaaaaattggctgggcatggtgctgtgtgtctgtagttccacctatgggggaggctgaggtgggagaatcagttgagctctggagtttgagaccagcctgggcaccttttctttacaaaacattggctgggcatggtgctgtgtgtctgtagttccacctatgggggaggctgaggtgggagaatcagttgagctctggagtttgagaccagcctgggcaacttggtgaaacctcgtctctactaaaaatacaaaaacaattagccaggcatagtggagtgcacctgtagtcccaactgctcaggagctgaggaaggaagatcacctgacctcaggaagttgaggctgctgtgagcagagatcatgccactgcactccagcctgggcaacagagtgagaccctgtcttaaaaaaaaaaaaaaaaaaaaagcctatgtttcactttgagttaatatttttttaaggtgtgagatttggttttgagcagtggatgtccaaatagcccttagttgaaaaggctatatccttccttcactgaattgctttggcacatttgtcaaaaattagtagaagatatttatgttgatttatttcagaattctatgtatatccttccaccaattccacatgttcttgagtactgtgagctataatatctagtagagcgactccttctactttatcctgctatttcaattacaaaaaataataaaccttttagggcctatgattttccatataaatttcacaataagcttgttgatgttttcaaaatatcttgtttagattttgataggaattgcattatatctatagatggatttggagtgatttgaaatcttttactatattgagtcctctaatatataaacatggtgtaagtatcaccatttaggtcctcttttattggcattttgtaatttttagcacatacattgtattagtctgttctcaccctgctataaagatactaccagagactgggtaatttataaagaaaagaggtttaattgacttggtttcacatggctggggaggcctcaggaaacttacaatcatggtggaaggtgaagggaaagcaaggaccttcctcacgtggcgtcaggagagagaagagtgaggtgtgaaggggaaagatccccttattaagccatcagatctcgtgagaactcactcactatcatgagaacagcatgtgggaaactgcccccatgatctaatcacctcccgccaggtgcctccctagacacgtggggattatggggattatacagttcaagatgatatttgggtggagacacagccaaactatatcatacatcctgcacctgttttgttgagcttacccataaagtgtttcattttctttttggtgattgtaattggttttgtgttttaaattttggcttctgcatgattattgttggtatatagcaatgttatgaattttctagggtgatcttgtatttcaaaactttgctgaactcacatttatagtagttctggaaattctttatttgttggaattttctacatagacaatcatgacatctgaatttggagcagtttttttaatctttccaatatgtagtttttatttctttttccttactgcagtgactagaatttttagtagtatgttgaataagaaaggtaagagcagagattcttgctcttcttgttcctaatcttaggaagaaaaagagttcaactttcaccattaagtatgatgttagctgtagattgtttgggtaagtgttctttatcaaattaatgaagttcctctctattcctaatttcttggagttttgagtattaaatattgtcacaaggcattttctgattcaattgatatgattatatgatttttcttctttagtctattaatgtggttgattacactgattgattttcaattgttgaaccaaccttacatacctgaaataaatcctacttggtcatagtatacaattatagtatatgtagtatacaattccttttatatagtgctgaattgatttgctcttctttctctagtttcttgaggtagaaacttaatgttttaagatccttcctcttttctcatataagtattagatttagcttagtgttgtaatttaatgtgtaatttaatttagtatttaatttagtttagtgcaataaatttccccttccacgctgctttagcagcatctgacatattttattatgttgtatgtttgactcttggacaaaatgagggcttggggtattgactcccgatggagttaaaaatttgcatttaacttttgaccaccccaaaatgtaactactaatagcctactgttgaatggaagccttaccaataagataaatggtccattaacacatattttgcatgttatatgttttacgtgctgtattcttataattaaatagagaaagaaaacattgttaagataattataaggaagataaatatatatttactattcattaagtgggagtggatcattatataagtcttcatgctcattattttcacattgagtaggctgaggaggaggagaaagaagggttggccttgttgtctcaggtggcaaaggcagaagaaaatttgtatataagtgaatctgtgtagttcaaacctgtgttgttcaaaggtcagctatattttcatgtgcattcagttctatgtttttgaaatttcctttgaggttttcaaaattttcttttacaactttctttttgactcatgggttatatagagatgtattgtttagtttcaaataaattggagattttaaatattataattctgttattgatttcaaatttgaatcattttcaatcagagaacacattcagtgtgaattcagttctttaacatttgttcaggattttttaacaggccagaatgtagtctatcttggtgaaagtttcacaagtatttgaaattaatgtgtatagtttgttttgtgtttacacacgcacacaaacacagatgcatacacatataaatcttctgttatctttttatttctatttaaagaacttcttttagtcattatttaagagtaggtgtgaagaaaaccaattctcttataaatagaactaagtacatctactttgtatacttttcttgagtgattctatattgtaatgatgtcctttttactagttctatcaattgctgagagtttgctgttgacgtccctgatttaattgtgggcttatctatttctcctttcagctgtatcagtcttgcttcatgcatgttaaagttctgttgttaggtgcatacatgtttaggatcattaggtctttctagtggagatatcattttatcattatgtaatgtccctcttaacctctagatatttggtttgttctgaaatctatgctatttgatagttactagttattccttttttcttttgattaatgtttgcagatatatttttctgattactaatttcaactgacctgtgttgatgtccatgaagtgaatgttgtacagatagcatattttttggatacttttttaaaaattaagtttatattctaatacactctgctaatctctgtcatttatttgtatatttagaccatttacatctgagattcttactgatatgctagccttatgtgtgcaattttattttttctatttcttgtctgttgtgggtctctgcatttctcttttctgaccttgctgtaggttacgtgaacacattttaggattctatcttggtgttttaacagcattttgggtatatcttttttgtatagtgtttttagtggctctaggtattaaagtatatgtaagtcacttatctactgacatggacatattactacttccattaaagtgtacttttatttccacttaggtcctttactcattctaccttttcagtataattgtcttaagtgtttcccctacatacagtgagcatcacattacactgagttgtaatttttgcttcaaccgtgaaatattatctagcaaactaataagagggaaagtctaacttatttccccctaattttattcattctgatattcttattttctttataagttctgaagcttttattatcattttgtttctatttaaagaacttcctttagtcatcctttaagaatgggtttgatgaaaacaaatactcttatttttcactcatctgagagtgtcttgatttttccttcattccgaaaggatatttttgctggatataaaatttatgattgacagttaattgctttcattacttgataaatgttgtgccactccttctggcttctaatttttcagatgagaaatctgttgtcatttgaactggtatttacttataagttttacatcattcctctggctgctttcaaggttttctctttgcttgttttgtatttagcagtttaatagtgaaagccctagcatgagtttccttggttttatcctattgtatgagatttgctcagcttcttgcatgtgtttgttaatgtcttttgccatattttcagtattttcagacattctttcttgaatacattttcactgccattctctcctcttattctaggattccagttatacaaatgttaactcttttgtttttaactcactggttcttgaagctctcttcaagtttttttttttccttttaatctctcttttcttatttgttcaaattaggtaaattcttttgatttccttcaggttcaggaatcctgtcatcttcctgttacccttgaacccatatagcaagtttgagtttgtttcaatggttgtatgtttcagttatttagtttccgtttggatcttttatatatatatatatatatataacttctatttctatgctggggtttctctcattttttttcttgcttgaaagaattcacaattgcttgttgatgcatttttattgtatctggtttaaaatccttgcctgataattccaacatatgattcatatcactgatggcatctgttgatcttcttctttcattcaagttgttattttgatggttcttagtatgacaagtgatttttattatatcctggatgttttgggtatcgtagtatgagactctggatccaaattcatcttctttttttattcagaagctgtccttacattgaggtgtgcacagaggccaggtgggtgtgtatgttcattcatcaccccgttgtcactgccaacatcatccagcagaagtggagcactgactcacactgcagcagatgggtagggtgaaacttcagcttccctgttgaccccttcccagtgaaagcgggccgcctattgctgctgccttgttgcccctcatggtgacatattcctaactccccactgagccacggaagggaaaaattcattgcttgttcacactactttgttgctgcagggtaggggtggaagctgagcttcctgctggtctctgtgacaccaggggaggtggggaatggagtgtcaagtaaccctcctcctatcaccttattctgcctcattgatgccaggtgtgagagaaggttctgcttctctccagaactctcccagttcttgtgaactgggtccaattcacaagaaagggaaaaaggatgtagagtattgattggccctaacacctagcacacagtctcactaataccactgggagtaggggctcagctcccctctaggccctgctcacttagtgagggtggggtgggaacagaatggagactaaccctgacacacaccacctcatgtggtcttgtgctgtgaagagagtggagaggttcattccctccttggtcccactgacaccagaggttggagtaaagtaaagtgctgatgagccctgactctcgtgtccttgtttagtcttgttaatattgggtggatgttgagcttcagctcctgactggggccctgccagagccggggggaatgtaatgtgctgactagtcctgccttgcaccacttcactaagtcttgctgctaccaggtaggggtggtggagatggtttagctacttgctgggctgaggtgacactaacttagtaaagagttggagcatggctgactcctttcagacaggggatgaaagatcagccctctgctcactctgccaatactatttagaaaagagaatcagagtggcacaacttccactgagcagaggacagaaaataagctccttatttggtctcatcaaaaccacccctacctacagttagacagctgcctgtttcaacaagtggagaatggaagatcagctctctgtttggtttattggaaccaccaggcaaggggaattggaacactgactgcttctgccagtgggaatagaaggttagctgcctcttggccctgtcaacaccactgtgaaagggaatcaaaaactactgcttacttctgttgggtgagagggtggggtgaaagattagctccctgatgagctcggctgctggaactatgaatgtgtgtgagtgtgtgtggggagagagtgtgtgtgtgtgtatgggtgtgcttgtgtgtgtgtgtttggtttttccattggagtttggctaaagtatgacaggtactttttgctaaaaaggttttctcttgtaggccaacattttcctgatcttctgtctaggaaaataagcctttccttggagcttattttgtctgtgcctgttggtggttctacgttagatgtttctggatattaaaacaacaacgaaaactagggaatttgccatgttgttcctcaagtcctcagattcctaattttttttcttctacctacttcgcaaagtcatcttacacttatttgttttgttatgttcagggctttttaattatagaaagagaactgggaggaataaggctgctccatctctgtcaggatcagaagtcatgtagtgttataaaaaggactttgtctaccattttaaaatagctgttggctgtaagctccttattgtatttaaagtatattggctaaaattgtgggaggtaaggaaaactctttgtaaagtgaactgacatggtgaaaagagagagaagatatgcttgtcaaatattgcgaagtctattcagatcaagctagacatggtctgtattagtcagggttctccagaagaaaagaaccaataggaggtgcatgtctgtgtgtgtatgaaaaggaatgtattagggagaatttgctcacatcattataaaggcaatgtcccacgacaggctgtcagcaagctatagaatgatagaagccactagtatgtctcccaaggaaggtgatactatgtctcagtccaagtcccaaagcttcaaaaccagggaagctgacagtgcatcccatagtctaaggctgaaagcctgagaacccccagatcccccagagaccactgctgcaagtttcagggtccaaaggctaaagaacctagagtctgatgtctaaaggcaggaggaagaaagggcattctgcactggaagagaaagagagaggcagctcacaaagcaagaaaagcctgcaagctgaatatcccccttcttctgtctgctttactgtagacacacctgcagctgattggatggtacccacctacattgagggtaggtctttctctcagtccactggcttatatgtcaatctcctctggaaacaccgcaatagatacatcaagaaacagtgctttaccagccatctaggtatccctcaatccagtcaaattaatattaaccatcacatggcctattcacaatttaaaaatgtagcataaattgcagcagtggtcaagtgtattggcaagttgtaaagtgcctataagaaacctatacacgagcatttgcagattcccttaacacttttcagcaaatattttgttacaattgaaattaaaaggcagtttgaaattgttcctctactaaatatcacactggatatgaataaaataactagatagactaacaaggtacatactttattgcctgtgattattgcaactaccactcctggtggagagccattcttctcaggtgtgcaagtggaagattaattctcaatcaggaatatagatttgatacaaggaaagcatttcacttggcattagtgtgtcaacatttcagctaatttgcctaaccacaaatacttcagggggaagagaaattgctagtgctttatattaaacattggatggagctggcggagataatacaatttgtactttttttacatagtttcaacgaattttggcagatatgtctttttgaggcaactttagatgttgaaaagctgcttgtggatattcaagacttgtctttttttcatgttacaatgaccatcaccatagtttgtatctgattttttttgtgtgaattgaggaatgtggagtcataatgcaaaagtcattgccataattctttgcagatcttatgactggaaattcttgtgtatgtagtttgatattcatttgtaacacatgtaactggttcgtgtaatgattaaaataataagtaatgcttgatcatggttaaaataaataccaaggataaattcttctattaattagtgtaagcttatcctaattaacatctttaattatgggctgttgttaatttttgtcgcaacctattagatatactgtcctaaatcattaacactagtgtaactgagcataaactctaggtgactcacggctacagtggaagcgcccatggaaaatatatatttctaagtacacagtttagataatttcaagcagaatcagaaaattcttgatgaattctaaatttagtataaacagaaatgtattaggtttggttattgagccaagcttcaaacattgaatatcagaattgtgtccatttgcaatgagtaagcatttgattcaagatttttttttgtactcagactcatttttgtatatctttctgtttaagtcatattgtatttactgcgattacagattttttacatatttcttaaactggttctatgttatgccattatataacaggtgataaggaatgtactgtcactgccccttgacaatgaaaaggggacatctctactagtgtatgtgtatgtagctgtggaggagttgaaacagtgtaagtgaaatgcctagaaattgtcctgagttttgattttgtttgtgcttacatttttattagtatatgtactttcttgaatagataattgatttggggcaatatttctcaatcttggcactactgacattttggactggataattattggttgtgcctggctttcctgtgcattgtaggatgttcagaagaatctctggtctctacccactagatgccagtagcaaacctgccacctctctgcctacttccgtcctgtcttgcaatagtcaaaaatgtctgcagacattgccaagtgtcccctaaggggcatgagccttggtggagagaaacttctttacagtctcatccttggcgatgtcatttccttataatttgcgtagttaaacatttttgttttgaggagcataagttgtgataccatacctgtacagaagaggcttggatttaaggttaaccacatttaactgagagaattttatcaaagcatgaaataagaaaaataggggcaaaaaatgaaattctaaaatggcttatgcaatttctaagggtagctaataagaattctgaattggtgacattgtttttaaaaaaagtaaagcattaaaagaatttcaaagataaaatatattttttggagtgtgaacactgtaattaaggagacccaataatgttaagttacttaaaggatgtatttttacttaaagtaggatacaagttggagaaattaacattcggttgattgttaaatattttgattcaaagaaagaacatagaattgtcagcctcaaaaaatatgcttaagatagaaaaataattttggttgcatgaaaagaaaaagattttagtaaattgttgacttgaaaaggggaactatttgacagaagtctcaacagtgttttggagtggcatagtgattggggggtgacatcagatgattagagttaaaaacgactggaccggctgggcgcggtggctcacgcctgtaatcccagcactttgggaggccgaggcggctggatcacaaggtcaggagagcgagaccatcctggctaacacggtgaaaacccgtctctactaaaaatacaaaaaattagccgggcgtggtggcgggcgcctgtagtcccagctacttgggaggctgaggcaggagaatggcgtgaacccgggaggcggagcttgcagtgagcggagatcgcgccactgcactccagcctgggcgacagagcgagactctgtctcaaaaaaaaaaaaaaaagactggaccagttattaggccttaagttgatgtaaactatatgacaaattgacaatttagagacattgtggggacatttctatgaaacgtctgtttattattcattcctgtgatgattttgaaagggcaaataaaatcataatcacatattgtataatgctttttgtctttcaaatacatatacattaaaaatgacttatataaagcaaaatgtacctttttgtgcacaattctattggtttttgtggatgtatactgttgcataaccaccatccaaccaatacacagaagagttctataacttcagaatattcctttgtgctactcttttatagtcattcccatcttcccatccccaccctctattgacccgtaaactgttttctgaataaatatctgggaaaaggattgctgtgccacatggtaggtgtatgtttaaagtttctcagaagttgacagactttttccacggtggctgtaccattttgccttctcaccagcaaaatgtcagattacagttgttttgcatcctggccagcacttggtatggccacttcatttatttatttagctcttcttctgataggtgtttagtggtatctcattatggttttaatttacacttctctaatgattgatgattttccccggtgactgatgatgattgaggatcttttcaggtgcttatttgcctcccatgtgtgtatcctctttagtgaaatgtttgttcaaatcttcccatttcaaaaaatgttggcccttttcttattatgaaatttctatggctctttatgtcttgtgcatagaagtcctctgtcaaacagatgtctgttttgcaaatattttcctgatttgtagcttgtcttctcaatattttaacagtgtcatttatagatcagaagtttccaattcttcaggtctggctcccctccataatctgtttgctttgattcacttttcagcatcctcatgtagttgctttttgtgtttggtctgagattttacttgtgattggcagggagagataggctgaacgtgactgagtggagtatagcatgagaagacttgcataatattttttttaattttcagtgttttgcaaacattatttttgatccattaataatgttaatgattgccattttatatacgagaaaataaaaaaatcaagagtcataagagtttaagttcataaataataaaaagccacatggaaataaccagtgatctaaatcacctggaacaactaaaaccttaaggtattatatcctagtttgtgtgttccgaccacaagcccctagaatgcaaattacttatgtaccttatttaattatgtttgctttacgtaattttagtactttaggaacttccttgattaaatttcaattcatacatttgctgaaaaataactaattttaaaactaagtaaggttattaagtaacttttttccatctggaggagaattgtttttgttccagattctttactgacacaatagtagcacactcgaataagtgcatagtatgcttcatggaagatcatgtgtaaaagccaggcttagtcaatgtttcttctgataatacatgtgaaaagttgaaaagaacctttatggtcattttcctagtaagcaagtcaattccttttgcttaaagcattttaacttcattaatgtaaaagacaatagatatctactatgtatacaacactttttaagagatcttgaggttacagaagatagtaaagccatggtgtctatccttaagaagctatacataataagaaagaaagaaatctcactgtgatattgagtatacatttttggaaagtaatttttgaataaaatcagatgttttaaaaaatcgtaaaaggttttgaatcaacattttcaaatatttagaaaataaatgagaaaaaagacagacccaaccaattccttccagtaattttgctctgatattaatgtaattcccttcagcttttatgtgcatattatatatgttattaaccatagtacatctttaaaacatatataattttgtctgctcacttttttttaaaaaaacagcattgtatcacagtttattttcatgtaccttcatagttcaaggtacaagggaagtaacagagattccctgagagaagacaatggatgttcctaagaaagacctagtgtgagagttcagggaactgctacactttggattttttttttttttttttttttttttgagacggagtcttgctctgtcatccaggctggagtgcagtggcacgatctcagctcactgcaagctctgcctcttggggtcatgccattctcctgcctcagcctcccgggactacaggcgcctgccaccatgcccggctaatttgttttgtatttttagtagagacagggtttcaccgtgttagtcaggatggtcgggatttcctgaccttgtgatccacctgcctcagcttcccaaagtgctgggattacaggtgtgagccaccacacctggccaggattggttttttaaaataatgtagaatgttttgtatttgtccttgcatcatgtaaagatttatccttaaaagtgcaatttgtctttggactataaactctgcgagggacaggacagtacttacatagcatgttaaaaattcaagtatcaatctacccatttaggtctattggctctttactgagtccagggttttatttacatgtatcactgaatgaatggccttaagaaggtacagatgagactactgaggcatagagagatttaacagaggcaagcagagcatcacaagcagtttggaactcaacacatgtttcttgtttgaaaatatgcacagacaaaagagggatggatagaaagttggttcaatataggattaagacctggaacaaaagcacatgggcaccagcagaatctacttgagaggtcacagcgcccaaggggaaacaaccctaggcaagtcacttaacctcactcaccttagttctcttgttggtaaaatgcagagtttatgcaaactcaatacatgtcaagaaatatctgcaaggcattgtttaaaattgaccctctggatttttttcatgcatgcctggttattatttattaagatgtactaggggcaagtctcaaatggaagaaaaaataaaaggcacatctgcaaagtgaagaagtggggttaagcgcaatgcaacagaaactcttatactaatccaggaggactttacctgtcaatcaaatctatattcattttttttaaagattaataatggtttgttaactgagtaagctggcagatggtaaagtaatgtgatgagatcttggggcatctatgaccagttgatgactgactgaccaatttcaaaagatgctatgaaggatcataaagtttagttccatgtggattttgatgatagttgcatctatatttaaagccttctgtcactggaagcactcttggtgttgtcagactgtctattggactggatgagctgcaacttctcgcaattgaatgtcaataagaccaaagcaattttggttgattcatagcaccagcttaagcatattcacttgcacagattacatttgacagatagttaccttcagctgaactctgtggttagaggcttgggcgtattcttgacagtgagcttagagttgatgtctaatgtttatttcatatcctgtttttaccttccctaatattgcatgtgtaaatctatatttaaatatattcacagctgatgttcttgtcggtccacttgttatctctggacagaatgctgtaatgattcaatttaattattttaataaaaataacttgcacccctccagttttaatttcaataaatctgacgagtaatgattaattttaaggagtcttattgatgagcaattgcaacactataatgcaggaaaatgcccaagtggtgggagcatgcttacatctatagtaaacttaaaaccttcaaaatttggtgtgtgattatgaacaccgaggaaatatatccacatttatttaccaaattattattcctgtatcttttttaagttatttaggtccatcagttatcttcaaagtttaggtttgaaactatccatttcaagaatattagccttttaagatgattataatttaaataacatattctaaaatgttttaattgaacagtagaatgcatgtaacccaaaacattataaaatttaaaaagtcacggccatttttgaatatttagattgggaaaacacttaagatgtggttttatgttcaagaagaggtgcaattatggtatggattcattcatcattatggtattgtattgtcaacttttcagttatgttcaatttttaagatgctgggtgggaaatttaagggacatatagatctaataatctgagcctaaatctcctgctctatacaaataactctgcaaagctttggaatccctttatttgactaggtgaatggcagttttgtttgcatcagcctaaacctagcttggaaatcatgattttaaagcaaacacgttttcctcacacatttccatatttcctagaatctatggttttaagatatcaaacaattcaaattatgtagttatacatttcacacaggacaaaaactcatgctgaagtaggtaaaatatttttcaaaattattttctctacatttactggcatactttctctttcttactgtcttttaaaactgacagtcagttttttttatttttctcttttactgacagctagtaaatgtactgacagttcagaagcaagatgtaaatgtaagtcactattattttgttcacctgatacctgagcattagtagaaatgcatggctatattttaaaataaaaactagattatttccaatggttctgaagggaagatgtatagaaaaactgtcctctgtaaataaaaatgtgtttgaggcaagattgcattacatttagaaatagcatactttcctcattaggatgtgattggtatttgtactgaagaaaatgggctaattatttaagtaagatgtatatttactttctgtttcattagctgtaaatctttatagcatataaatctcctttagaaattaatgggaagtatataagtgagggaaagaaagcaggttatgaagttaataaataccatgttaaaaattagtttctacttaaatataaagttcaagattaaaaattaaaaattgttttattttaattagaaaaatcttgcttagttaatttctctggaagaaatgctatataagcagttaaatgtggagaattatattctattgataaaagtatgttgggccagactgaaccaacaacatcatagaaggactgattccttacttcctttaaaaagtgatctgtcatttgtctacattataaataacagctgagttttaaaacacaaggagatttttaaaaagtggcagcatttatttatttactgcttagacagtattcacagtattttatttcatccttaagactctttttttgttttgctcccacattattgttacacatatgggaattggtaaagtgggaaaacttagcatttatagatttttatactgaagcatgcgatgataaagtagtcactttcatccaagaaccttttcctcttttcacttacactagctcttccagaaatggcccctttagtgcctttaatggttttattctccttctgtcactatttttaatattcttattcttatactgccatcatatataactttgtgaaaatttgtcatataaggttaaaattgatttgcctttaaatacagtagtttccattttctgttaactgtttgaagaacacctattgagaggcaaggaaagacctgcgggataagttacaaaaggcaagaattcctcacagaaaaagcagcaggagcttccttgtcaagagcttcagcaagtagtgtcagcagcttagaagttgctattggactgctgagtgttatgcagataaattgtggctctagcttgtcctccgatgtcattctttgatttttctctgttaacactgcatttgcatttgggtctcactgagaacaaggaccagtgcaaatgccttatggcatgtgtagaaagctgcttttatgttaaaagtgatatgttttcttgttcactgtgttcacaacaaaaattcatcttccgagtcttggaattcccttatgtatttgtaattttccttccaagtcataatattcatatacaaagagtggaaatttttctttaaaaaaacctaccaaacaacaaaaacagtaaagttagttggttactagcagcaacaactgaaaagcagcatcaccaaaacatatgcaattcatgggtttccagcaaaagaggaaatctggaaagagaagatccttaagtattgctttaaagtgagcactgaaggacagccgttaaaacaatcccaatttttagaaaaggtattattccctgacatttacttgttttattcccttctcaatctgaagacacattttggacagatgctcttgtcttacatgaacattcaattcatttgagaaaataatggttatacttaaactcgtgaagtgaaatgtatggaagtctgttgctttataactttaaatagccatgtaacttgttcatggcagaatatagtcaagtcctgggcaaggactttttttctcttctccaataatgctattcaaggggaagctagttattgtgtgacacatgcttgattctcaggaggtttggacaaaagagagggttagaaggtcaggagagcctgacgctattcaactagatatttgagtagaattcccacaccagaattttgcctcatacctaattcagacagtgtaataatgggggaagggcagagagagggagggcagatggaggtgtcctttcaggttaaatgttaaaataagggtcttcatttctgtctctggtggcacagagcattaaaaaccctgtgacacattttggaagtgttgctataaaatagattttaacgtttgaggatctataaagggtattattgagtacttaatagattctgtgtttgcctactgaaatcactacaccgccgatatatacctcattaatttgtaaagcagtttggcccaacttgagacaatgtactgtattaaagcaaagtctatatcccaaattttcatggctaataattacaaaacgttcagcatctgaagaaaattatctaaatgtgacaatattggtcttggatagtttaacttgcgtgaaatatttcacacagaaacatttgatctatattgaagagttgtttcttttttcatcagatcagctatatcacagtaaattgtggaaatagaaaatggaaactaaattgttgaaaatgcatctgatagtttgtttttattgccaaaatgtcattgtccttgaggtccatcactttgtagcttagtaaaaacagatttaggcattgcaagtgagaagtcattgactgttttccttgtaaccaatttatttatcaagttggtaagtttcagaagtatttccagtgttcagcctatttcttcacttttctattttccaaattatatcctattacttcaaagatgtataaagttcacacattctggattctttatctcttttattgttttctgcttcatacaaagtaattaaattatgttcttgaagtaattcctcctatcttacttaaaatcaccttcatgatctgtcaagagttttcaagttgttctgtgataaagttcttagagtttgagaagctaaatggtggagttggtgcttaagctcttcactgaaagctgcaagagtataaacgaagtcagaaattactattattattatttttttctcattgagacggagtctcactctgtcgcccaggctggattgcagtggcgtgatctcagctcacggcaagctccgcctcccgggttcgctccattatcctgcctcagcctcccgagtggctgggactacaggtgcccgtcaccacgccaggctaattttttgtatttttagtagagacggggtttcactgtgttagccaggatggtctcgatctcctgaccttgtgatctgcctacctcagcctcccaaagtcccaaagtgctgagattacaggcatgagacaccacacccagcatatatatatatatatatatatatagttttttggtttttgttttttgtttgtttgtttgtttgtttgtttgtttgtttttttgagacgagtctcgctctgtcgcccaggctggagtgcagtggcaggatctcggctcactgcaagctctgcctcccgggttcatgcctcagcctcccgagtagcttggactacaggcgcccgccaccacgaccagcaaattttttgtatttttagtagagatggggtttcaccgtgttagccaggatggtctcaatctcctgaccttgtgatccgcctgccttagcctcccaaagtgctgggattacaggcatgagccactgcacccggcctgaaatgactattctttttaataacttctatttattgttttgtgttattcataattgttgtgcaatttaatttatttcactagtagaacactatgtacaggactgtactgtgtggaggttttagaagtgacaaaaccagttaactaggctcttggtccaaaggaatttagtgaaagagataagacataaacactaatgactgtaacatttatggaataataaataggagctgctgaaagttgtgatttcttctcattatgatagtgcttcttggattataaaaaatttaacctagaacatgaggtttcaagaggcagagatggggagagaagaattccaggtttgggactaggatgtagaaaggcagaaaggtgaaaatattcttgtgatgatggcaaacagtgactggtcaagtttgccaagagtaggttttatgcaagagcgtagtaagatgaaaccctgaaggaattttactgtcagatgatagaaaccggaataaagctgaggatacagttcaataatcaaagggaaccaaatgaaagttttgagcaaagaagggatcttattaaaacagccttttattatttcttttaagctagaggtagcttggcattatctgtgccagctcagagtgaccttcaccccaaaattctagttggattatggagcagttaatcttacaggctctaataattctgtcaccctttgttgtcattctatatctgtgtcccttcagttatgtgtcttctcccatattctcataccattatttctctgtctttcatttctttactttcatcatccacatcaggacaatgtttttattctatagtagtttgtaaacatgtcacattctttagactttcaagctctttgtcaacagtttttcaaagtccttgccttacataaacactaattctttccctttagggacccctttcctggcccttccaagcaaagggtgctcattcatccactcctcatgcacctcattgctgggagcaagtagagatgtagggattgctttcttctttttcttttacctcatattggaaagagatgtttcctttaaagctcatgttaagttgttgtgtacctttcttcaatttttgcatcaatttttgcaaaccttgcatcaatttttgcagctgctgacaccttggataccccagccacctgcctgccagatacaatgaaaaatttcacctctgactcacagtgtttctctgcatcattatcagcttttggttaatgaccatgaagcttcactttttcacctcttgaaaacttttggctacagaatgaagttaagcgcctaggtgcttatattgtctttgagtctgttgggttccttctaggttcagtttcttcacttctagcctagcccacaaggaaaatatctttagtagtcttttaaccattttcttttatttcattttttttcattctgttgccaccagacacctattctcaaatcattcacctgactgccttcttaattcctgtgtatagattgcagaatattactgaaaaaaaacaggtgtgtggattgaggccactaaaaattaatgatttccaactagagatggacccttagtgcagccttagggtaaatttcagaggtgcagctgattcaaagggtgtgcacaatttcaggggtatattgacctactgtcttcagaaaatgtttgactagtgcagactcctaccgaaagagaatcagagtgcctattcctcaaattattgttaatataaggaattatcttttctcatttttttctaattttatgggcaaaatagtatgagtgtattcttatttcatttagcatttcttcccctacctcgtacttatcttaccttacataggcttattagccagccacatgtattttttgcttctgggtaatagctgtgtattgttctcttatttttttaaataaaggggtctgcatttttattaatgactaagaaatcttgatatatttagaaattatatgtaaaaataattttaaattttttttattctactttaagttctggggtacacatgcagaacttgcaggtttatgtcatagttataaaaaaagaaagaaagcataggcagagaaggaaaatcactctggacagaaaaaaataattggttaaaatattaaagaataaaatttgtaggtaaaaataataaattttaaaatgacagtttaaaaatttatatgtaggctgggtgtggtgccccatgccgatagtcccagcactttgggaggcctacgcaggaggatcacttgagtccaggatttcaaggccaggttgggcaacatagcaagacgtcatctctacaaaaaaaaaaaaaaagaaagaaagaaagaaagaaaaaaaattagccaggcatggtggtgcatgcctgtagtcccagctactcagaaggctaagatgggaagatcttctgagcctgggaggtcaaggctgtgagccatggtcgtgccactgcactccagcctaggcaacagagccagatcctctcgcaaaacaaacaaacaaacaaattacatgtgaaaagaattatacgtgaagataataatttcagacatacaatcctatgttaactcccatagaaaattaagggagttatcacacctttgcttttaacaattctttctcttcccacattccagttttgttgaaataagcagagcttcttatcccagcttattgtagcaaaatcattatagtaaaatgatatttttatttcaagcattacaatagcactttataacttatttaaaaatttatatgatgttaaaaggattcaatactcattgagtatcctttcataacatacatctctaatttcttaatttgaattgagctttctatttggtgagagtatttctattctgaaaaggaacatggccagtgatgtaccttctgaatctttgcgtagttgagcctgtctttctaatgcctgtacccatgaacaatgtctggatgatgatggatttttttttcttataccctttcgtttgtgagcttttaatacattgcatcgtgtttctgaagagaaatctgagacaagcttaaggattatttttcactgtgggtgacccgtttttgtgtgcctgagtgagattcttacaggtttctttctttatccttaaaatcccaggactaccagcctatagtttggtgttaattaatctttgttttcttgagaatatggtaagcttttcttagctgaatattcaggtcatatttttaatcccttaattttggtttctatcatgtctttgagtttatattttcattatttgttttcttcgggctttcatcctgtgaaatttagtgaccaatatagttttattccttttatgtccaagatacataagaagttgtatgtactctagtgtccattcgttcatcaacttattccaattaccccaaacccctatttccaagggcttttcttcttccgttcagactctttatttgggtcttttcgtggttccttgcttaacactatgcacttttcacggcacacactttccctgggaattcttactcacaaccatgactcctagtactattttcatatgcatagttataaaacctgtaatttctaaatttatattgccacagtgctatcagtgagctttcaaaattcaaattcaagtatgatttttcttagttttaagatttcttcagttggaatggagacccttaatgacttagctctgacaactgttcagcctcatgttctgtaaggtctcctctgggacctcacattctagtaacactgagctgtctagtctttaattgtatccatctttcttatgttgctacaactgcacatgttctttaccaagaatactctcccttactatttattccgcttaatcctactttttcctttcactcatttggcatcaacattttcaggaagccttttcttatctcaaaatctgagtagacatgcactcatcctttctatgaaattatcgcaatttactcaatgtgctttatttgtgtccatcactagactccagaacttttagatcaagaattttaccttatttagtgttgttcccttcagggctcggcatcatgtttgaatgtgatccattctcaataaacaaagtttgattgaatgagtgatggcatcatccagtattagaacaaagttgataggacagtttgtttagaagctcttgcaagaatacagttgacccatgaactacaaggaattgaattgcccaggtctgcttttatgtgaattttttcgagctaaacacagattgaaaatacagtacttgcaggatgtaaaatccgactatgcacagggccgactttttgtatccctgggctccgcaaggctaactgcgagacttgggtatgattagattttggttatttatgcctggatcctggaaccaatcccttgaagactgtacagatgagagatattagttgatcgaatatgtagcaggagaaaactgaaaaaggaaaagaaatttatgaagtaaattaatgagaccgctgcatttcattactactttggagattagaggaacaataaaggtgactttaaaattttgaaccaacttctttataacatggcttacaagtggtagctagaaagaggagggttggttacttttgctttgtatattgcaatacatttctgattgttccctttccacttttccccctagtattgttgattactttgtctttgtaaaaaacttcatcgtgaaaatttctttctaaaatgtaaatgtgattacctccttcctctccttaaataaacactatgctcacgattgctcacactccagagaatgaaatttccttcccttagcaacatgttcaagatccttcaaaatttgttagatggtgcctctatagcttcattgtccttctatgtactttgagttttaaccatgatatttttttgcctcccaaaatcatgtactttgtggttttcatgcaagctcttcctgtttgccttattcagttgcttctagcttgtacacttttccctctccctcttcaactccatttctttgtgtacgtatctcaatgaccaccacaaatacaacttcctctgtaaaacacactaatttcttctctccttttctcctctctgctcctatagcacttttttttcttattggctgtatgacatttattacataggcatattttattagatattaagtaggttttgcattaggtatatttttgaatgtactgaaaggcagatactttattcattcatatgtgctcagaagagcaaaatatctcttacataatgtatgtttaatataagtaaatatacaaacaaatagaaatattgagtttggtaaaagatgatattgagaaaaagtgatatgtgatagaatgaaaagctacatatattttctaaatgatgggtggacatttacaactttgctaaattatatattaaatcatctctttatcctgaaaaaattatcttttccatgattagtaagtactttacagtctcttctaggttataaagctcagtactctaattagttttagaaaaactgtgactaaactagcagtactgttttttctcccatattttgtctcacactgaagtcagtgatatttttttctgttcacagatatattcactcttagccttccctgagctctattacagcctggaaaataactggaatttcctttaaaataatacacattttcttaacttatcatattaaatgaaaaacacacaaacactggcctcctttcacattccctagaactttttgttttttctgtatttggcatttctgatgtctttaattttttgtgattctggctctgtattctggtgcctggaacagtgttgcttccaaataaataggcagtagtgatagcaatactcataaatattttaagctatttggaaaaagatattttttagaagctgtgttttgaatgaccttcccatttaactacagtgaatttcattcttagttccttcccaatatctaccctcttgcatcttcttttatgttgtttctaacgtcttttgcggtacctatcaatttactgtcatctactgttttcattaagattgctacttgtagatcattaataaaaaggtgaaataaaactaaattccttatcaattctctccttaagtcaataagtatccagttttaaatgacagtgcttgaattcaagttcatattaaatgttacttcaaataagtttgggagtttacacatacatggctctttggttcaattacatttgtcttatttattttgttttctgttcccttgtagtattctttgataaacttgtcctttaaaatatatattccaactaaactctgcttagggcctaagtggtgtagccctctggggagggtcgcaaatgtaatttgtttgattggatactcaagcttttcaattgttttcttttccttagagaaatagaacctttctagctttcaggtcaattgatgtaatggttggattcagatggaatgacactttctccccattgtaagtctctagttcctcagagaaatccttgggaaatctgttgacaacttgctgtcatccagctgttctgatggtataaatgacttagacactgattcctggtagtttaaaagtctaatggaacagtgaaattttgagatctcaagtgcatcatgaataaagcacttaagtagcacttgtatatacttcttacaatttgttaactggttttctgctttttttttttgctggagaaagagatttacagttttaatctgattagacattagcagctggttgaagatgctattactgtgaagtatggaaaagaacacaatcatgatgaaaactttttactcaaatccttagaagaagaaagcagatgaaattagattggcaaaggaaaccagcccaaattacacacaggagagaaatgtagcagaggagagtactgagttggtgctgcacgcatagagcttacagcctccatgggcaggggacatgtgggtgtgactgccagggacaggaattgcaaacagcatttggagtgacagtctgggtcagcttctcatgctctttcccatcaccaggcatcagcgagtggaaagatttgacctgattttggagcacagagtgtgggctctaaggccacaggaaggcaggtgaatgggactaggatgtagtggagtccccatggctaaaaaataagttgtattgcatacctgcctttgccccacaattatcaaatccaatctagggtgaatagaaacacatctgcagacagatccaatgtccacctacaaaaagtttcagaaaatgaaaacagatggagaaaaaaaattataaaaatataaagaattctggtaaagttgccaaaagaaatgagtcttctagtcaaatgggctttgttctattagtagatgttgagacgaatgcagtgaattgattagagctgatgttatttgtttgggtgcatacatgtgtgcctggtgaggggtgggtgagggaagaaaaaaaactcaaacaaataagaaacatattgagagaaaaataatacctagagaattaaaatagtacactataacaaagtttgtgagtgattattaaggcttgtgtgggtattcgggggctctctgaggtgtcaatatgtaaactgagatctgacagtaaagactcagctaccttatatctcttcatccctacatcttgttctaagaaaacatcagaagtcctgtgatctcagcataagttgaaaactcgtaagtagtcattcaaaggtggatttgtggagggtagaggtaaactaccttgattatatttacatagaatggaagtgatgctaatttagaaatgtccattgctgtaagtcttaggagatgtaaagtaccaatgaaagatcctgaacagtattatgtgacagaaaatgagcgttacacttttaaaaaaatattagatgttgtaactttagtcattctcacctttaccttttaagtatttcaccatttaatatcaaccttcattattgatttatttctaaagatatctggaaatagtttaggctcattaattttctttttaagagtcaaatcggcatgcaaatgtttctcccaccaagaaatttttttcctggacttcaccttctgaggcatgtccacctttgaggcaagctaagccaggctttgtgaaggcagaaccatccgaagcacacagccccaccaaatttctctccctccttccctccctcccctgttcctctctccttctctttcttttttctctttctttctctttctttctctttctttcttccttccttcctttctttctttccttctttctttctttctttctttctttctttctttctttctttctttctttctttctttctttttatttctttccttctctttctttctttttatttctttccttctctttctttctttcttttttttttctttctctttcttctctcttcccccctcccctgctctcccctgctctcccctccccttccctttctttcagctgctgcttacctggggtaacatggtttgggaagaaacatgtcagaattggagtgaataaatataaatgataaaaagacaaaatgaatattattttcaagagtaattaccagtatgaagttcttcagatgataacaaaaactattgacttattttgtctaaatcaatgccactatcttatctgtgtgattgtgaagggaggaaaggaaactgttcactgaatattctgcatttgacccgtaaatacctacttttgtattcagggatgatatattcttaccttaaattaatgactgttttctactgttcttttttggtgcaaacaaattaaatgtgtgcacttctccatgactgattgtgcaaaaactgcttagacaattactatctctctagcttttgatcagaaaggactaccttgaaacaatggccacaataatggtattattctcaattctagaatttatttaaacaaacaattcaaatcatatttcataatacagttctctgaaggagcttaaagagattcagatttttccttttgtttaacatggctcttcatttagtttttgaggcatatttttaataaattttgctcagtactgtctactggagctgaaaaaatctaagaagacacaaaatggctgaagcataggtacttacagaaaagcatgcctttcttttaagaatataaaattaatacattatttatttattatataatgggatgttctacccttgttgaagattttagcagatataactcatgcacagtgtaagtgagcattcacccctgttttgtttatatggcaggactatttctacaaattttacaaattactgtttaggatctttatgacatccattgagtgctggcatgataaatgattttctatatatctgtctacatattgagggcctgattgatggcccttctgacttggggtcagcagtgagttcacatctcttggtatactttggcttattccctggaagtataaacagaaatccaatgaccactattttcattattttccttcaggcataatctgacctaatgatatgtaactgtattactgtgatttaagagatttttaaaaaactataaacattttgaggaaaagtgaaaatggtgattttaaatttaacacatttaaatattcattttatgaaaagaatatttgaaagaatagggatttatcaggatcaatagaaggcttggagtaacctaatcattttaaattttattccttcttgtttttttctgttttcccacaacttattcactaccctctatattctcatactttgctaaatcatattaatccttcaagagttggtttagatgaagcttcattcatttgataaagattaaatgagtgtccagtagttgctagctcaccttgttctgttgtgcttcacagacaatgtgttttatttttatttttattttatttttttacaaagtgaaggtttatggcaaccttgcttcaggcaaacatgtcatatattagtgctatttttccaacagcatgtgctcgttttgtgtatgcttcacattttggcaattctcacagaaatttaaatttttttccaatcattatagctgttatggtggtctgtgatcagtgatttttgatgttattataatttcagggggtgccatgaaccacaccaatatgatatggcaaagttaaccaataaatgttgtgtgtgttatgacttctccaccgacagaatgttcttctgacttgttccttctccttgggcctccctgttccctgagacacaacaatattgaaattaaattagaccgagtaataaccctacagtggcctctcagtgttcaagtgaaaggaagagtaacatttctctcacttgaaatcaaaagctagaaatgagtaagcttagtgaggaaggcatgtagaaagttgacaggttgaaagctagtcctcttgcaccaaacagccaagttgaatgcaaaggaaaatttcttgagggaaaattaaagtgctactctaatgaccacaaaaatgataaaaactgaaacagctttattgctgatgtggagaaaatttgagtggtctggatagaagatcagaccagctacaatattctcttaaaccaaagtctaatccagacaaggccctaactattccattatgtgaaggctgagagaagtgagcaagctacaaaagaaaagttggaagctagcagagattggttcacaaggtttaaggaaagaagtagtttccataacataaaagtgcaaggttgaaagagcaagtgctgttgtagaagttgcaagttatccagaagatctagataagatcactgatgaaggtggctacactaaacaacataatttcaatgtggatgaaaaagtcttctgttggaagaagatgccacctaggactttcatagctagagaagagaaatcaatgcctagtttcaaagctccaaaaataagactgagtctcttgttaggggctaatgcagttggggactttactgcacaggtggtaggtgccctaacccccatattgttaaagggtcaatggtttatagaaataatatagaagtaagtgtgtgattctatctaatctatctatctagtagtatctgtctatattcatattccctatatatccatagtccctacagccatccactgaggggagagagtgggcctgggagtagtaacactgaaatagcacgaatctacttagcaccgaatctttgttcctaaagaccactcatctcttagaggaaccaggattccttggagaaatggctgattccagggctgtggtggggaagtacaaaatgagcctagaacatcttgtgtcataaagtaagaagatacttaaagaattattagaacatgtcaatatgatccagaatgcagctgtatggggtctatactgtccaaacctggaacaacttgagcactgaaatacatattgagagtaattaattatatcccactgagtaaaatagagactcatgagtctatatagataaaaataagcctaagcatatattgaatttttaataagcaataggatatttatacagtcttgaagtatctgctcgcaaaatgtttgctaattgcaaaggggaaaattgtatttttacagtgtggaagcctggcagatatattaatgcaaatgattaaagttaacatcattaataatggaacaaatagaaatgatgtaagacatgataagatataatatgatcactgtatcacctgaatttaatcatgaggaaaaattagacaaacccaaattgagaggcaatctacaaaataactgggcggtcctctttaacagtattaagatcagaaaagccaaggaaagattgaagaactctttttttttttgggtcggcactgcttttttattttattttattattattatactttaagttttagggtacatgtgcacaatgtgcaggcttgttacatatgtatacacgtgccatgttggtgtgctgcacccatcaactcatgatttagcattaggtatatctctcaatgctatccctcccccctccccccaccccacaaaagtccccagtgtgtgatgttccccttcctgtgtccatgcgttctcattgttcaattcccacctatgagtgagaacatgcagtgtttggttttttgtccttgcgatagtttgctgagaatgatggtttccagtttcatccacgttcctacaaaggacatgaactcatcagtttttatggctgcatagtattccatggtgtatatgtgccacattttcttaatccagtctatcggtgttggacatttgggttggttctaaatctttgctattgtgaatagggccgcaataaacatacgtgtctctttcagatcaaaagaaaacttagagtcatgacaactaaaggcaacatgtgatttggggctggaggtgttttttctataaaagactttttggggtcattgacaaaacttgaatgggctttaaagataaaatggtaatgatatacgaataactttgatgtttacatcgtgcttatgtaaaagaatgtctttttgtagcaaatacacgttgcggtattcagggggaatgggtcattaggtcaaaaatttaatctcaaatgggtcagaaaaaattctttgtactactcttgtgactttcctgtaacgttgagatagttattttttaaagtaataaaaaacagaaactactgattgagctgcattacagatagaatgggaaaagagaaaatggacagaggaagtacaaacaacttacttgaggaacacctcaatagagagaagaagagtaacagggaaatatttggtggaggagacttccaagatattttcacgttctcatctttgttcctaaccactttattcatatttatttattatattgcctcctttcattgaaagtattttatacgccatttctattacagattgtaaattccttgaagaaaaggtctgtgctttatataccccttatgtgtagtatatgtagcatcacacttagcatatcataatgtgcttgtttcatattcaaacaacaggaccattttcaaacaagtgattggattttagtgagagtatgaagagcagttttctttataaacatgggagacaaaagaggttgactcacttttaaggagaggacattgtagttataacaagtaacttctagctcattgggatgtaacatgctgaaaaagttttctaaggtattttacagctaacttgataatcttttggaaatcatctgttctccatgagtaaaatagaaaaaggcacaatgatatattgaaataattaagagtatctaatattgtgatgaagtgtgcaccaaaagctttcttaaatgtagaagtgtacatgacacctctttaagcagtatctacaaaaaaccagctggaactctccctattccttaggaattcaataaatcagactgttggcagattttccatcatgtatatgtgtaaattaatagcttttttttggcagtagagagaagagagtaatctaaatgtgtaggaagaagaggccatgagagtttcacatccagtcaagataggacaaaaaaaaatctacttgcattcctatgttaaatttttaaagatcaattaaatggagacttgtttggtggaggttgcagtatatgaagagctttaatagagatgaggggagaacagcaaatccagagaatcatacccagggcacaaatgtaatacacgtaggctttttctgtagattgcttcaagagcctggcttggcttgtctgagttactcagagaggaaaaaatgaaagtgagtgtatatgttggtttggggtgtgtgaaggtgtgggaatggagagaagtggacagagggaaaatgtgttgaaataaaacaccaggagctcatggaaaatgcaaaacagaaacaaaaccaagaaaaaatctttgaggggcatacctgtgtatgaattcatttttccatagcacctttaacatagtcaaaacaaataaaatttaagcagttattcagtcaaactagtagcaggtgcacacacacattccaaacattacaaatatttgtgggccacccacctggttaatttctgccaaagcaactatccctgaataatttcctcaagtacttattcatattgtttgtataaacgtcactcaatagagaatatttaataaactggagcatttataattatataaaaattcatgtcagtaaacaaggccactctgaaaagttatgtgaagaatcacagtatgacacattttgttagaaaacggtgccttttctttattgcttagagttgtaacatcacatagttcatgttgttgttttcattttcggggtatcaattagttgatcaatcagttagtgtttattaagcttctgtccagcaggtaaagcatgctcatcaaatttgcaaatgacataaatgttagagggatggtaaaggcactgcatgacagacatagcatccaaaaagattttgacagctcggagcaataggctgaatctaacaagatgaaatataacatagataaatataaatgcctacctttgggtccacaaagccaactgtacatgtatagcattgagtagatgtgaattagctgttgatgtaagcaggaaaaaaaagacagtattttagttaatagtcagctcaacttaatttatcagttttagctgcatgatgtcattgccaaaaatctagcctgcaattttgaattgtattaaggtgacaatcctgtaccagtttgacaggtcagaccacatctagagattgtagtatttctggagccacattttaagaagagagacactaaaaactatgtcatatttagaacatcacagaaactaaacacatttatcctgaagaagacttaggagaggaatgacatccttctttacatttatgtaagctctcacatggaaaagggattaaatttgtttggtgcagtctcaataattagaactggaacttgtgaactgaagttataaggagatacctttgggttcaatcatttataataattacatataatagtaaaagctgttcagagagaaaggcgttcccaaaatctgcagaggcagaatactagcacagtttagcctgagtgtcctcctttgcaaagtggggacaacaccattgtgaagcagcgatctgggaaggcagtgggatgatatagggaaaatgttcagcacaatgaggggcatgtagtaagtaagtggttatagtacacaggggatgtcacctttcctattgtgggaggtggtgacaccaatcctgaatcatcactgggtagaggtatagaagagatgctaaatggatggatttgacaaactgactgttacttcaaaaccctaactgactgcaacttattaattaaatttgccatttaaaactgtctctgaaaccaccagtcacgcttctatagcaccttgagtatttttttttttttttttttttttttgagacagagtctggctctgttccccaagctggagtgcagtggcgcgatctcggctcaccacaacctccgcctcccgggtttagcaactctctgcttcagcctcccgagtagcccggattacaggctcgtgccaccatacccagctaatttttgtatttttagcagggacagggtttcaccatcttggccaggctggttttgaactctttacctctttacctacctcgtgatccacttacctctgcctcccaaactgctaggaatacaggcgtgagccaccgcaccaagctattctttttttcttttttttctttttttggatagagtctcactctgtcgcccaggctggagtgcagtggcgtgatgtcggctcaccgcaacctccacctccccggttcaagtaattatcctgcctcagcctcccaagtagctgtaattacaggaatgcaccaccacaactggctaatttttttgtatttttagtagagacggagtttcgccatgttggccaggctggtctagaacttttcacctcaagtgatccgcccacctcggcctcccaaagtgctgggattacaggcacgcgccattgtgcctggccaaatttttgttttcaatcctctgtgcttatttttaattatctttaaaatggagaaaaaggtaaacctgccttaggtaactgtaaagttaaaaagaatgaatatgcataaatattttagaacaatgtctgacatactttttttttttttttttttttggcagagtctcactctgtcacccaggctgtagtgcaatggcgccatcttggctcactgcaacctctgcctcccgggttcaaaagattctcccgcctcagcctcccgagtagctgggactacaggtgtgtgccaccacacccagctaatttttgtatatatatatattttttaagtacagacggggtttcactatgttggccaggctggtctcaaactcctgacctcatgatctgcctgcctcagcctcccaaagttctaggattagaggtgtgagcctccatgcccggcccatactagctttttaatatatgttaactacttttgtaatgccaaagtaggtggcaaaggattattggagaagagaggacttgagatgtgtgttttgaaaaatactaaaaatttagttaagtgcctatatggaaatagcttgaacacatcatgagattaagtggtgtgtgatcgtcagacagtgaggagactttaccagttagattggaggtcggctgttggtgaaggttagaaataaattgggtgagatgagtgaggaaaaatctcagaaggccttaggtttaggatggtaagcaataggatgggatgtgtggggattccacgtgttcgtaggtaggggaatacaacatacatgtgatttttaaaataaacttatagagttttcaggatacattgccttactttagcttaaaaattatggatggaatagtggaatctttttatgcaaatccttctttcacttagaaatagaaatttctatttcagggcaatttctatttcagaaagtccaagacttttctcctccataaagttttctcttctgattcatattacagtggttttctttttgtttgaatttcttagcattcaaaatgatgttccttatatttgtatcatccatcatgatcttttaaggggaaatttaaatttaagatacgttgtcaaatcgcttaatgttaatctattagaaaggtgttattctgaatgcataaaatggttttgctttaaatgaggccctccaaattaataaaactgctcttcctgggaagcttctaagttggttctgggaaagcaagtcacacagagaaggtccaaaaatacgttatacaccacatatattaacaaattaagacataatttctcaaagcaactccttggaaaagataatccttcttgactgcattaagattcagtatttaagttagaaacaaccatcatcatttatagtgattcaaacactatctagcatattaaaatgtattttgttgtcatcatacatacaagctccttgagagaaaggatcatgacttaactcttgttggtgtagctcatagggccactgtgggtaccgagttgatgctttatgaattcagtttaaattagaagaatgtaggcaatgggattaccatttgtccagtaacaaattcagcacaggtattctgtctctctatttcccagcctgagtcagcagtttcttttagttctgatggccagcaggagtaaaatagcagcaaagatctggcatttcagtggcacaggtgattgtggaaaattactataatctaggtggactcgattctattttccccttgctaggtactgagatattgtgtaactttctggacttttgaattatacttctcactaatctagcatgagaatgggtggatagtgtcaagaattctacttaaaaaaaaaaaaatctagtgtactcttgtactcaaagggatgagtacaatctatcacagggacacaaatgtgaccaaaaaagtggttaaaataaaatatgaaactgaagagaatgaagatttgagcatgaccttctctgtatcttctttccaaagtgttttcggatctcttatgaaggggatttaaaggcttttctacaactgctactgcttttgtcaattcattcattcaagacacaccaataaacatgcacgagctcctcttgtcctcatagggctagagaatgagataggtgcaaagtttattttagcagaaggctttcttttcacaaatcagaaattccattgtatgtattcccttaaataactggcaaggggaccatcggaatgagctatggcaaaaatccacctcagtctttacagcttcagggtgatggggccccagatcagaattgtaaaatagtttagagaatcttggaacataaaacatggtgcagaaaaaccaaggaagatttaatcttatgtatggaaaggtggttggtagtggagggggcaatggaagagagtggcttgggatcatcattaatcattatttaagtacctataaagtgaaaatatccttctggaattcactgcaagtgacactgaattcttctactaagcaaatatgtgatgagttgataaaaaagaaggtcctgaactcttgacaacagatataatacagtgaatacagaaaatcaaaaacatgctttctatctgactcaaaataaaggtgcacttaaacttgtaaaagacaacatttttatttgaatgatatgacagaagtgtcacgggagtgttacctgctataaagaaagcctaagaattattacctttattagaccagtgacactgagctttagccatacatttctaacttctgtccctctacagagacaattttcttttcttaaataaactgtcatgctagtgttaatatattgttggctctctcatgctctgagaatactgctgatataaaacatgtatatgttagattggtaatagtatctttagtgtagctgactagaacaaatgtgtttccctcatggctgtgctaatgtgataaaggaaaattggctgttcatcagcttttggctgggtaaagacagtagagatggaaccacattcttttttatgcattaataccactgagaacttttcactagttatatttcatgtgcctgcatgttgtgcaaagatgttgtaaaacatgagataatgctacaaataacaaagtagaaaagcctgtatcttttataatgataacagtcaaacaccaaatgacagtaacaggctgtaaaaaatgggatgcaaaaaaaatgcagccctactacccaacaaagcggaatatatccaggcccttgaggacttggtatatgatttgaggtatattaaagctttgttttaaaattaaatcaaatgcaacactagatcaatggatttaagaaagaacatagtttaaatgaaagtagggtggttagaatggagaaaagccattgtgggtaacttcttgaaataatccgtattaccaagtaattattgtagtaacttcctgttttttttgttttgttgtgttttgcttgtttttttggggggggacattgaaaaagatttttaaggcaatagtacacatgattttaagatgtttgagaataaatgtttatcttcattaattattgcaagtctttttaacataaaagcattaaaagtataaccagtttcaggctcacagcaaaactgagtggaaatttcagagatctcccaaacatgctgtacccccatgtacccacagcctccccctctattaaagccctgcaccagagtggtatatttgttacaattgccggacctacactgatacatcattaccactcaaagtccatagcagaatagcatgttgaatgttttgctatcattttaattaaaatgttaacatccaacctttcctttgcatgaccttaaatctcactctttcctcccctctctcaacccctcccctttccagagccttttatttgccatttcagctccttcactaattagagtaccaattattcctttttcatttaagctaaaagcacttgaacaaaaagactatttgcagagatgaagttgatgtccaaacagctgattagtttatttagaagtgtatgcaattaaaaattttgtgcaggtatctatgggtgttttccataaaagtttgatagcattggctattctgggctccagtcgcataaacaaaaatcccatagctttttaatcatgtaatccaagagttatcaagctacaacctgtgggtcaaattggctggccacctgtttttataaataaagttttatttggacacagccatgcccatttgtttatatattgtctgtggatgcttttgcattacagcattagagttgggcagttgtgacagtaaccatttggcccataaaaccaaaccatttgacttgcagagaaaaaaacattctctagctatttacagaaaaaaaaaattgctaatccctaatatgtgcagttattaggctacttgcttgattgattagtctagaatatgattggcaactttttgttaccctacattggaaaagtatatctgaaaatcaccaaccggataccaatacccaagacagtaaattcaagaaatatttgatcctagtaacttgaattatatccacatgcaattctttgttgttatatctggttttaattatttctttcccttgtactcattttgctctatttccaaatatagccataacaaatttaatttgtatttaaagaagtaacatatcctcaaaaaccctgtaaaacatggcaaccagagctgttacatgtatgggacaaactattatgtatacctgtgaacaccctgggagatatcatcacagcacaaaatgacactatataggtttatatctagataaacacatggagatatcactgagctattaaaataatgttttcagtcttcccagctgaacaaagtaaagaagaaagaaagttacttaataaaaactgctgaaatgtgtttaatataaaataaaagtttatgcacttaaactaataatggtggtaatttcttacaggtgcatcagacaaaaatcagcttctttatcaatggcgtggagaaggatcatacacctttcaatgcaagaactctaagtggttcaattacagattttgcatctggtactgtgcaaataggacagagtttaaatggtaagtttctgacttcagaatgttatttatttcatccaattacattgttcttaaaaatgcatcaaacaaataatattttaaaatatctacgtgtattcatcttctagggctactgaacaaattaccaccaactggatggcagattaatgaaagtaaaatttattttttcacagttttggaagctggaagtcagaaattaagggttcagtggtgttggttccttctggaggctctgagggcaaatctattccatgtctctcttcgtggtagctactggcaatccttagtgttcctttacttgctgcttcctaactgcaatcttgcctcagtcttcatgtggccttctcctctgaatcttctcccctttacctctgttataaggacacttgtcattggatttagggcccactcacagtcaggaggatctcaccctgagttccttaacttaattatacttgcaaagaccctttttccaaattaaagtcatagttacaggttccagatggataatagatcttttgggatctactatataacttactacatttgggaagctttcaaatataaacttctttattctgatcagtttttaagtaatttcaatgtgtaataaactatatttcctttctgtctcttttctgaggggtttgcattttcatgtagagaattgttaaagtagaactacgaagtattagatggaacctgagaaatagtattgacatgtaattaactggactgatgtttacatttactacattaaaaatgggccatatagtttaagaagatatcatatactatatattgaataaaaccagaagttgaaataagaaattatcttgaaatatctagtacagtggtctttaaaatgcctgcatattaaaataaaaatagtattttatattattatataatatatgctcattataaaaaaatctaaacaatatggaactctgtgaaatagaaagtattttccatatttctatcttcagagatagatataatttaacttttttatactcctacagatttttagtacatttttagctagagatatagttataaatacatttttccaaaaataaaattacaatacatatgcttcctctgagccttctaaaaataaatacttctccttcaaatgttataaacaacgtttcatgtcaatgtatcttctcatttagatatatgttctcatttaaaatggctgtattctatgcaattgtatagttgcaatccatgagatttcttaagctcctataatgaacatttaggtttttttaatgtttcagtgcaattagcagttattttatggaaaatattatatatatatccacatatatttatatatctgtgtctatatctacatttccatttatatatatcaaccatcaatctatcaatcatatacatagatgtatacatacgtacatatgtatttgagcagttgcctgattgcacagttccttaatatcctatttggtgccaacctgcgtgaattcatatcccatttcctcacttactagctatatggcctggcaagatattttaatatctctaaagtgtagtcaccccaactttaaaatgatgatgatgatgatcataatattgatttcccatagggccaatgtaaggatcaaatgaagcaatgtcatgtaaaacattactgtgtttcaagcacctggcatgtattagatattcaatatttatttgttaaatgaatgaatggatgaagtgctaagcacaatgcctgtatataaactatattttctctttcttgggcatggggctggattttaatgtacagcattgttaaagtaggactgtacagtattagatgaaaactgagaaataatattaacatataattaactggactatgtggtttatattttcgcacactaaaaattggccatgtagtttaagaagataacatatatgctatatattgaaaaaaattactaaactatatcagtaaataataataatattattattttattattatttttttttgacagggagtttcgctcttgtcgcccaggctggagtgcagtggtgcaatctcggctctctgcaacctctgtctcctgggttcaagtgattctcctgcctcagcctcctgagtagctgggattacagatgtgcaccaccacgcctaacttttgtatttttagtagagatggggtttcaccatgttggccaggctggtctcgaactcctggcctcaggtgatccacccaccttggcctctcaaagtgctgggattacaggcgtgagccaccgcaccctgccgtaaataatactattattaatgttattataattatttccaaaaaataaattcatagaagttgaatggctgggttgaagtatatggtcattttatattttaatacatattacagagattgctctaatgcataacaatgggctacctccagaaaggttgtgaaaatttataacctcattaaaatatatagccaagtacttgtttccttaaacactaactatccttacaaattatccacttttttttcacccttgacattcctctaagtgaaaaatattgttgaatgctgactcagaattatttggccattaatgagtttgagtagctttttacgtatgtcttgatcatttgcatttcatttatgaattccttattcatacaatgtgtccatatttatactctataattccttatttatttataaaaactcatttatgttaagaatattatgttgtataagttttcttcagttttttgatggcttatgaactttgtggtctagatattttaaagtaatcctttaatatttaagcaaaataaaacatgtatgcaagatagtgcataaatataaaaggtatagcttgatgagtttttaatatttatatacacctgtgtaactctcatttaaaaaaagtcgtagaatatttccagaatctcagagtcccctaatgaacatccactgtaaagataaaaacagaatagcatcaatgtagccctctataaccatagattaatgttgcctgttctcaaactatcatacaaataaaatcatgaagtaggtactcttttgtgttctttttgcttagcactatgccaatgagatttttccatagtgtatgcagttatatctttagctttagcaaataattctgtaaagttttccaaagtgggtgtcccaacaagcaacatttgaggatttcagttgttccacatccttatcaactgttagttttgccagatgttatcattctttgccattcttgtagccatgtagtgcatttcctgatcattagtgatactgagatcttttcatgtgcttatttgccaaatgaatatgcttttttgggaagccttttgccaagttttaattggacagtttgtatttttcttaataatttataggaggtcttccatattttgaatatgagttctttgacaaatacatgatagcaaatatggtcttctgggctaaggcttacagtcacattctcttgatggtatttgtcgataagcagatcttcttaattttaatgagtctaatttagtcattgttttatacttaatactttttgtgttctgtttagactatttttgcaaaccctgatatcacgaagatatcctcctacagtttattcaggaagctttattattttacttttcaaattttggtctatgttctatctggaatagattttttgaggttatataaggtaggggtcaaaatttttgtcccacctgaatgtgtaattaacctagaaaaccttgcctcttgaaacaaatcaatgtttctaccattctgcagtggtaacgttgtcgtgaatcaggtctctgtatatgtgaagatgggtttctttctgaactttctattctgccccagtgatctgtctgtctgtctatacttgggccaaaatatttagttttaattactgtaacttcatacatgtcttcatatctagtagttctccaactttttttcttttaagattgccttggctattatatatgaattttagaaacagtttttcaattttcataaaaaattctgttgagatttaaattactcatttgtatttaggagaatgggcatctgaacaatatcaagtatccagcccataaatgtaatatattccttgatttctcccagcaatgtttttagttgtctgtatagaggtctcactcctatttgttagacttgttcaaacatattcattggttttccttcttaatagactatttttttagagcaattttagagtcacagaaaaattgagtggaaagtatagagagttccagtatactctctgctcctacacacgcacagccttccccattgtcaatatccctcaccagagcggtatatggtatatttgttacaattgatgaacctacattgacacatcattatcacccacagtccatagtttacattaaagttcactcttggtgttgtacaacgacaagtatccactactccagtatcctacagagtagcttcactccctaaaaatcttctatgttcctcatattcatccttatctctatcctaacccctagcaatcactgatcttttcactgtctctgtattttcaccttttctagaatatcatatagttgggataaaaaaatcatgtatcctcagattggcttgtttcactgagtaatatgcatgtaagatttctccatgtctttcatggcttggtggttcatatcttcttagtactaaataatattccatggttagatatagcatagttgatttattcattcacctactgaaggacatcttggttgcttccaagttttggcaattatgagtaaagttgctataaacatcagtgtgtaggtttttgtgtgaacataagttttcaacttataaataccaaagagcgcaattactggatcgtatggtaagatatgtttagttttgtaagaaactgtaaaattgtcttccaaaatgactatatcgttttacattcctatcagcaatgaaagagagtccctgttgccccacatcctcaccagcatttggtattgtcagtgttctggctttttggcctgttggttttcatgcaattatacttagtattgtttttgaacttcatttgctaattttgttactattgcattaaaatctaatcagtttttatatttacctatgtttagtgaccttgccaaactcattattatgataggtacacaatcctatcatttgcacatatcaggaactcaactctttttgaatgtttgtaataaatgtatataatggacatgccataaatatctcctgtagatatttttgtctgatgcacttattaattctgaaataatataaaatgttattttgtttttctgtatgacctgagttattagaccaatgtctagttttaaaaaagaaggtatatatttttgatattcaaaacactgtggttaaattgccaagctctggtttaaatataacccaggtgtgcttctttgatcaaaatattaactctctttaagtctggtttctaatctattaaatggtggtttaatatataattcataggaatcttataagaattatgtgagatgatgtatgtttagaatataagttgcttgttgtatagtaaatgtgcattaagtggtaactatttttaaactctttgaacatcaattttcttattgtgaaacaataagatagggataacactatatttccatatgattgttgtaccaatcaaaagagaaaatatgaagaccgtattactttagtttgtgtatgctcttagatcaagctaaactcatgtgaagaagcaatattttaaggaacttatatatttaggaacttggtttgagtaattagtataatgcataatcttataaaatactctgcgtgaagaatttttaaataacacattaaatcttgtgagccttatttcaatatttaatccccattagtacttctaaaagtgttttattgcaccaaatgttgctcaaagtatttgatagcgccataaattagtcccctatgcactgcagggttaaaatggcttgcttctattctacttcagtatactaaatgttggattaatgcttcaaaagaacagtgtgaactgaagatgatatttttaaactgtgtagaaataaatttcactcctgattagaaaacatgtaacaggaaaccggtttatttcaaatattatttagttttcattacaactttctcctttatgttcttgacatctgagagctacagaaggaaaaggatattttaaataatttttatctttattctatcaatttatatgtacagtcgtacctactgtatcttttctctaattagagatggcgtatagactggctcattacttctgcctaatgagccaggctccatgccacctctctaatcagaaaagagataggtacagaatgttcctatggacttattataaatcattttctttctcttacttgctcctttttttaatcaaaaaattaagtcactgtcctccatacttttgtccatatccaagatggtttctttcaaaagaggtaattgtgcaagcgattactgagctgaattaaaggtgctctcatgcagtgccaggccggctgtctctgctttggaacagacactgcctcaaacacaagcacatcaaatgaaggcctatagcagatcaagatggatcttttctgtctttctctgattaggtttgacttggttctctgtttctgcacccagaaagtaacaaccttccatatgagtgttggctactacagagctttttctttgagtcttatctctagcataactctctagaaaaatgtgttgccagtgacactttctgttactgcaggacttgtctttgctttccctggaaaagtaatcaatggaccaaatgcatgctttttactgaaccctcatttatccttattaatggtataatctgatttgatcaggctgaattttatgtatacaaatagaaacaccttagaccatctatatcaaccaaagtgtgatggctcctttttagaacattttcttttagttgtagatttattttagtgcttccaattgggtatataacctggagcacttgtgttagcagatatgtagttatgaggagtcagcaatgtcatcgtggtaataaaccatactagctctccaaattttggatttaaaattacagaactacatgaatcaaaacttttcccagttatttctgaacttgtttatcaacagagttctagttgccgattaaaggtgagaatttctacattatacattcaaatgtgcatagcactttcttaagaagatcattggtcattaaggaatcaataaatatttgttgagtgtctgttaaagtgaatatgcagggaagaaaaggatcatcgtctaaagctaactcctacttgccttcctttctgtgttttcaacgttgtgtgtcttagcccatatgcttgtacttgattctaaagttggaatgctacttctaatttctaccagtttcccatgggttcacatttctaacctctgctagatacacaaactccattttagttcagctgaaatcatgctaatttttttcagagagaattatttttgggaattagatttaaaaaaagcttagaaagtattgaaattgactaagagattggaatggaagaagagtataggaatatagtatatagataggagtttacttagtttcagaacattgcagacaaggtatctagcaatattatcagacaagttatgttgtatatttaaaatgatgttaatgtagctctctcaaccatactaagtaaaaactgctgattaattaaaatttgaatgcaaaatatgcaatcataaggtagtagaggaaaatgaaggcaagtgtttctataattctagcatattaaggacctttattagcacgataccatgtccagaaacactaaaggaaaatattgaaacatctgactattaaactgggaatttaaaattcaaacaacgattatcattttgtacttgatagtttggcaaggactagaaaagcgattataccggtgttggaaatagtttggggtaacctggcaaactatcaaaagtaaaaatgcgaaaactacttaatccaagatttctacttccaggacactatctcgagaatataattagacaaagacttaaatacatactcaaaatgttcattgtagaatgatttaaagtaacaaataactggaatcagttaaaaacttcaaaaaggaattgatttaataaattataattcatgcctactgtggaatagtatacaccatcaagaggaatgaaatatgtctctttctatgtacatggcaatgggttcatgatgtgttattacatgaaacaaacaagattgtatagtacaaaattctataaatttaatgtatatgttataaacatacatatacatattaaagttctggaaggaaatatgccaaaatgttcttcagaatgttagtaatgttaatctctatgagtgggattgcaaataattgctttttaaatttctttttgtgcaatttttttcagtaaactataattttataataagaattaaaaatattttccaattttggacaaaataataaatggaagcattttcagaatagatttattctatgaatgtaacaagttcagccagagacacctaatttgtatagtacagagggtggtcttgaaaatgttagtcatttaaattctgtacttgtcacatggattcaggaaacacaagcgttcattggacatttaactcattgtacatacaattattattactataataatttgtgcctgagaagcaaagcatgagatttagaatcagacagatttgggtttgaatgctagttctgcttcttaacagccaagtgactttggcaaagaatataacttctcaatccaatttcctaatatgttttctcatttataaaatgtgttttatacacatacttttcagggtgatcagagagcttataaataacacatgtttgattcatgttaggtattcaataaaatttcgctatcataaatattattgttaatttagttattaagtttattgactgtgatacttaaaattttaacataatggccatgaccatatttaattttttttggctgaaaatcaaaatttacttagggtgagggagaaaaaaagtccagtttagattcattatgtagcagatattttaaaattctgtgttttgtctatgtaaaccccacaaaataatttctctctctttttaaagatctgtcctttctagtgttcttcaatgtttcctgttcatcctcacttccacctgatgctatttcttcttaatccgaagaacctcccttttcattgcttgtagctcagcctgctgaagcaaattctctcagcttgtgtaaaaatgtctttacttttgcaggatattttcatttgatatagaattctacattgattactgttacttcttttagaactttaaagatgttgtttccttgtcttcttgccttcattgtttctggtgagatatcagccactatttatataaatgttttcttgtatactatatgtttctttccttctttctttctttctttctttctttctttctttctttctttctttctttctttctttctttctttctttttgaagcagagtctttcactctgtcaacccaggctggagtgcagtggtgcgatcttggctcactgcaacatctgcctcctgggttcaagtaattctcatgcctcagcctcccgagtagctgagattacaggtgtatgccaccatgccaatttttgtattttcagtagagaccgtgtttcaccatgttggccaggctggtctcgaactcctgacctcagatgatccaccctcctcagcctcccaaagtgctgggattacaagtgtgagccaccatgcctggcctatatattgttttccacttgatgctgttaagattttatttttatctttcatgttatcagtttatgatatgcctaggaatgattttcattatatttgtcctgcttgaggtttgcttaaattcttggatatgtacgttggtgttttcattacatttggaagttctgatagttgtatcttcaaacttttctttctttttttcctttttttgcttccttttctttcttctgtaataagactctagttagattgatgttagagcactagatattgtcccatagatattgggtacagttttgtttgttcctttgttttcattttccccactcttttttgtgtttcagtttggatactttctatttgacttgtctttatttcactggtcaatttctcttttgtgtctaggctgctgctaagcccatctagcaaactgttgatttctaaattatacttttcatttcaagtattttcatttggccgttttgtagacttcatctattggctcaaattcacccatctatttgcatgtattattcactatcacccctagatcttttagcatttatattataggtattttcaaatccctatttgataattccaacatctgggccatgtctgcatctccttctattgactctttcctctctttacaaagggccacattgtgttgatttctcatgtgtcttaaatatttttattgtatgataaacactttgcgtaaaagaatgaaagaggtggaagtaaatcatattttttggcgtttttccctttacaaagaagagcactgctggttctatgagaccttttgaatgggggtgggcagtaggaaagaaaaaataccaaactgacttgaagttgatctgtacgtgggctttactacagttttaatattatttagctcactactggtttcagatatctgtggatagaattgaaaatagttagacacatgtctggtggggcctccttagaattctaatatgtcattctggcctctgtatggctgcttctttcttactccttctatgcctgaatcctctatttcttacctctgagctaagtatgggagtagccctgggtctcgtccaatgagttacatgtccagtaaatgtttgtgtttcctacaaaaggcttattactttctagaatttaattcatttagttttttctgtgcgctctacattttgattggttaaaaaataatgactttagggcttatctggcttgttttggttgttagattgacagcaaagtgatggtcccttacaactttttacatttaaagcagatgttgaactattataacaacatctaatttatacccctttttttctttggcacaactctgtctatacttaactctccaaccctctagattgtttcagctatggctggtcactgactctgaacaaaaaaggtgcatattacttggccccaaagattattttggtagaattcaggcatcgacgttttaattacctcctctaatttttcatggggattttcagcttttgtgggccctaatttatccctgactcttaacttttatatctgtttctttggtttgcctgaaatctgtttactgctaatatttaaaactgaaacatgtttttttataaatctagccattggatcttgtttcactaatgatcatgtggcatcgtttaatctcggtgcccccagcggctctgtttgttcagtttgtatagcacatgcatctcttgtgtttctttttctgtcagatacataatcatattgattagtgtataccccttataccctgagtccaaaaattcctcatccctcccgggatcttcaaatgatttaacgactttccactatctctcactttttgatgtggtctgttccctccttactcaacttaagtttcatggccagttattataaccacttcttttcatggaactggacttccctgccgttttttcttcacttctactatgatcttggcactaccacagcataggttaaatatacccaaagaggacgactcttcccaccttaaactcatgaccatgaacttcctatgtttcctgatgctgccctgtgatcattccatatttccctcattcattcactttcctgtcttatgccaactatttatacattttcctttctcattatcctgatcctcagtgattatattacctccaactttaccataaaaattaacaaaaagaataaaagagcttctatagatttccactgctatatttatccaccactggcataccacctattaatagatctgaccaagaatatcttgcctcatttttccccaatttactgctgtattgtaaaattttcttgtattaatggaacattttcaagggaataaaggcatgttgttatttttccatgaaaaattattcttgaccctcccccatttcttctactagccattgtcttatttatttgctctccttttagcaaaacttcaccaaagtatattcaaccataggagcctttaattcctcttttcaaattccaccatctacagtcagactttagctcaccactgcacttaagctacacttgtcaaatctctactcaccttcacattataaatctaatagttaatttcaagtctttatctttttgacctattaacatcatttaatggagttgatcgctccttcctccttggtatacgttcttcacttggcatctaacactccatcatctctctgagtttctagttgctgcgtctcagtttgatttactggttcctcttcatctacttgacctcttagtattggtaccccaagccttaagacttagctctgctcccgtgtctacagacactcactcccttaaagatcacctccagtcttatagctttaaatgtcatctaagtgacttgacctccaaatataaatctccccaccccagcctctttcctgaactccagacgactctgttacatgtatcaaactacccaaagtctccatttgaatgtttaatttacatttcaaaattaaacttactttttttcaaaatggaactggttttcttaagctctctcactttgatccatatactacttcttccatggtcttcctcatcacaagtgaaggcaatttcatttttccactaagacagagaaaaagatttggagtcatccttgtcaattctctttatctcatgttcaacatttttttttttgttttgcaaaatcttgttggtgttagaatcaaaatatatccagattttgaatccttcttagcacttccactagaatcatcccagtccaattcatggttgctgctttgccgggattactgcattgtcttttaactacttccaggcactccgctttattctcaacacagcagccataattgttctgttaaatatcagtcaagcatattacttctctgctcaaaatgctctattgtttctccattttaccagagtgaaaaccaccattcttactataacctacaagacctaactgagctaacagcagttacttctctggctttatttcttacatttgtttattttgttctccttgttttacacaaattggcctctttgccgatttttgactatgggaggtgcacttctgccttgataccattcgctgttctttcaacctggaacttttcacctcctgatatccatcaggctgactcccttacctgattaggtctgctcaataccagtttcttaaatacatctttcttatcaccccgtttacatctgcaaacaccacctccccactttgggtctcattatgttgctctattcttttccatagcacttagcatctttaatgtattatagaattgacttatttttgttgaatatatctgtttttccctctataatataaaagagaaagcaagattttttttatttgcattactcactgatataccccaggatccagaagattgcctatcacatggtagctactcaatacatattttccaagtaaatgaatcgatgggcagcttccatgcagcattaagcctgtgggtgtgtggaatgcaagaattgaagcttgggagcctctgcctagatttcagaggatgtacagaaaagcctgggtgtccaggcagtggcctgctgcaggggcataaccctcatggccctagaacctctattagggcagcgaaaaggggaaatgtggtgttgcagtctccactgagtcccctctaggacattgccttgtggaactgtgagaagagggccaccatactccagaacccagaatggtagccactggcagctttcaccctcagcaaggaaaaactgcaggcactcagtgccagcatatgagagcagccactggagctaagccctgcaaagtcagaggggtagagcttcccaaggccttgggagctcactcctcccaccaatgtgccctggatatgagacgtggagtcaaaggagattattttggagcactaaaatttgatgactgcccttttgggtttcagacttgcatgggggctgtagcctcttttgtttggctgatttatcccgtttggaatggaaatatttactcaatgcttgtatctgaattatactttggaggtaaataactgggttttgattttacaggctcataggtagaagggaattgccttgtctcagatgagactttggactttggagttaatgctggaatgagttaagactttgggagactgttgggaagggataattgtattttgcaacatgaaaatgacatgaaatttgggaggggccagaggcagaatgacatggtttggatctgtgtccccatgcatgttcagttgtaatccccagggtggaggtgatacctggtgggagatgattggattctggaggtggatttttcatgaatgatttattgtgatagtgaatgagttatcacaagatctggttattttaaagtgtgtggcacctcctcccactttgctcctgctttccacatgtgatgtacctgcttctccttcaccttctgccattattgtgggcttcctgaggcctctccagaagccaaacagatattagcactatccttcctgtaaagcatgcagaactatgagtcaactaaccctcttttctttctaaattacccagcctcaggtatttctttatagcaaagcaagaatagactaatacattatcctttgttactgatgtctaaaaatcttttttaaaaaaattaaaagcaagtatattaagacagtaaaggaataaaaaatggctactccataggcagagcagccccaaggactgctggttgcccatttttatggttttttcttgattatatgctgaataaggggtgggttgtttgttagttttccctgaaaggggtgggcaattcccagaattgaggatccctccctgttttaggccatatacggtaacttcctgatgttgacatggcatttgtaaactgtcatggtactgatgggagagtatcagtgaggacaaccagaggtcactcttattgccgtattggttttcgtgggttttagctggcttctttactgcaatctgttttatcagcaaggtctttatgacctgtgtcttgagccaacctcctatctcatcctgtgacttaggatgacttaccctcttgagaatgcagcccagtaggcctcagccttattttacggagcccctattcaagatggagttgctctggttcaaaagcccctgacaattaccccctcctttttaaaagaaagctcttaatcttaagagttgtagagggatgaagatccatcttctctaacttcttcaagctgaataggggtgatgatattcctgcctaacaattagggtctcttgtctttgggatagagaggaactcaatcagaaaatgctggtatgtcaaggtccattcagaatacttgagttctgacaaaagttgatacctggaagattaataagtatttaatttaagaaaacattcggtaagcttatcctacacaaagagtataacagcaatacattccgcagcagtaaagcaaaataaataaaattatcacaactaaactaaattagaagactttccatgaactgggcaattgttagaaccaagctaatatgtggttgctagtaaatcccagtatgtgcccagaattagaatattgatccagattttgacattgcccattcattttggttttttttgaatagtagtcagagatcacttggtggtacacagaaataagcagagtctgtctaaattacagaaaaaaaaccttaaacacaactaatgagactagaatctaataacaggtgtaccatagtttttgaagcaattctttttcttttcagtctctcatttttactaaagacaaattataatagaatcgatttgtgcgcaaaaatgagctttagtcttatacttggcctgattacttgtataaaatgctaaaaaataactatttttcacataggattttaaaattggctttgatggaactttgttccataaaaaggaatctcagataagacctttttaaagctgagcccagccctgggtttgtacaatcaaatacctatgagttgggttaattcctttactcttgaggtcctaagatatcttcgggcccctgagtctatcagaaagtgacattctttacttatcacaggtcaggaaccctgtacagggcatgtgtaaacaaagaatgtgaccagttttcccaaggggtttttattggctttataagtcaagattgattccttaaaggaaagcacaccattccagtgaaagtcttggtaaaataacaaatttttccaattgtgtcctgttacaaaataaaacagatgcttattgcacttatgcaaatatctattgtcataagttaagaatactcacaaatagtttctaaattctgaagaaattaggtagaatcaaatatgccccaaattttgtttacaggagtaaaatttactcaattgttaaaaagctgtaaatagcttaaaagaaaagttgccttggctctgatagcaaaacaaaggatcagcaacattttaagcaaaaagttttaaaagattacttcagctatctattattcagcccatgcagttaactcttgttcagcttgatattcatgaacatttcagctctccatcagtactgaaagttttatcctctcttctaatgtcacaatcttcaaagttattagaaacgtgcattcaagagcacctgtcaaaatcctatagctgactctaaacttactttttaaagaggattaaaacaggtcaacaattttctatggatgacaaaaagttttagaacgacatatattaaagccacaattgataaagaaattttggttagttctgtgacatacaatgattttactgacaattataactattactgataatgtacactaagtcatatcagaattacaggactttcccataattttggaacacaaaccaataacatatttttacaaatacagtccaaagaaagcaaagaccatttcatatttttctatgcttcctgtatgatatttataccaaataacctgaatatgccattttggactttaggccacctaatagctaagagattaattaggtcagaagaagacatactttgtaattttattttggaaagcttgtcaaatattaaaggtttaaaacactggatatcacaaaatataattccaggtcatcataagtcattcattaggccaaaataataactcaaaaatatttaaaggggaaaaacctttactcattaatagagggaagacttagatctccaaaccatctgtctcttttctttcctttcctatataaaatttcttttttagaaacaacctctttgcatagttgggaatatggctaattccacatgtccccaggccttatctagaatctaaagtctccaaagtaggtaaattgaacaattttcaaaagtcaaagaagcagtttctgaccttaaagcatttagtaaacttaatatgtgacctgcctaatttagaccaaatgtctttattttatcaataatttttaaagctgtttttatttcccaaacattcctaaagtcacatgaactaaaagtgattacactttttacttttctgacaaaatatttgatttagacacttattatttttaaaccgattaatcaaagctcttttatatcacatatgcagcacatataaatacacagacagaaaaagatccagtaagatttttcatttttcggtttcttaactggattactggcttcagggtggagccttagaggaacagagccaagaatgcgtgaaatttctaaagcctaataagcaggcacagctggaaggcaaactagatcttcaggaattaagggttccattttaatagcagattctggatcccaaaaagagggaattagcccatctcccatgggagtcttacctctcagtggggagtgggggcatttccataacttctaagtgaccaagagcatgcttctctgatccaaatgtgcaaagagccaagtattccataactgccattagccattctcaaaagtgtatttcctacctagttattgcataccaaagctctttcctaatgtaaagtgatttctgatacccccaaaagtaaaaaacatcagataacgcaatgcgaaacacaagacagccttagattttgagagggatctatccatttccaattcctgggatttcatgaggaaaacagatgttttttctcaaaatggggtctgtggtgctcctttttttcccaaggagtcccaggctgttagaacttaaatatctgcttttaattaagctgacttttaatggtactgctgtttttaaaaagtcctcttaaatttcttattacctgactttagccaggcgaaactgtcaataattctggcttttgaactttatcaaaggtaacctcccaggtgttcagagaaaggaaaattcaagacagaccattgaggggaagagaatcaacaaatgttcatgcgcatatcaaaccagaaaggactcattccctaagctgggaattgaaccctgaacctgggtcaccattgtgaaaagaaagcctcagctactgagctactcactgggcagtttccattgctcttcccagaaggagtctagagcagcagattttgagcttgcaaaggttttaaatgctcaagataattttgtagagctaactatgacatgaacccccaaattcctgttttctggatggtagagacctagagaaagtaccgccatgtggtcacaaggtcaagctcccaaggacataactagccagtttgctgggccgtcttgaacagtaggcttatggggtcctaagcttgtgttctatcctaaggtacccctctttctaacagaaatatacaggaagacaaattcacagtgcaaagtacaacagattcactgtagcttaaaactagcctcacaaatcctttttcacattaatcagaactttacagaggagataaacagtgatttttaccattctttgaactagtttgcacagagagaaagagagaggacagaagtctcactggtaagaaattcttacccttttgctggcatgccaggcttctgggttccctttccctgagcagtcctagtgacccagcttgacgcatcatagccctgggggccaagctgcaacacaaaggaaaattgtctttttttctgtcctggccagagcaaaatatgtgtgacatagacattagccactctgctcagcatccaatatcaaactaacaaggctcaaatttgcccctggttggaccctgtcatcattaatccaacctctgaccagaagtttcaacatgtggtctctgggcaagatggtcaccctgagtaagagaaaaggtaagaaagggaaaggagagaaagaaagaaaagcattggctgcatacagcagggtggggaaggcaaaataatcaaggataccagagaaagaccctcccattgcgcaaaagttcaggctgccgcttgaagggatctgtcatgaagggatcttttccagtagtcccattagctctcaaacatcccccttttgggaggaaaaagctccccaagtcccacattcacatgcatgcctaattatgtcacccacagccatcagcaaagagggcaaggcagattaacccaacgagaatagcagttaatatctcgtattgccaaacccattattagctgagagggactttactgagaggggcctgaaaccccctaaatcttaggaaggactctaaccttcttaagttgggccttgaatccatgttctgtcaagtgtccttgtcttttattaagaggggcctttaaccacctctgtcttaagagagactctaacgcccctaaattaggcctctaacccatttccatcctttacccaagcaaatgtaccccacttacccagagtcagccaataagtgctgaagtctatttcctttgggtcaggggagtctcctccgtgttgtcccttccatggttcaccagaaagatgttaccagaaagaggtccagatccagaccccaagagatacattaaaacaaagcaagttttccttttgaacttgtcaaaaattccatcttgtaaaggatattaaatgttgctttaagctgaaccttgagcaaattaggtggtttgtgtgaccatacatgtatgtggtggcttcttgtttgcaacttcaaggaacaagtattaatagttcagtgtatgatgttgatttgagttgagcatttgcagtttggataatcttaaattttgacagacactagctgtggagactctttctgttactaaatccttttgttttgaagctattgccattcgtctttctcttgtcctttatattttttgtctgtttctttaagcttttattggaaatgtgcataagtaaagaattacttgtgttacttgccaagcaatgcacatttcatagttttaaatctgtaatcagcaataaaaatcctaaaatatgtatctaagaacatcttaaaaaattctttctcactcaagaaagaattcaaggtgagtccatagagtaaagtgaaaccaagtttattaagaaagtaaaggaataaagaatggctactccgtgtagagcagcacccccaatgtctaaaaatcttaacaatgataataaaagcagaaaacatatggtaattttttggcataaaacccttactgcagtgagcattaaaaacaaataaactgctttggttcttcattctagagacatcatatttaaaaacttagatttcattatttgattttcattttgttacaaaataaaatattcttagtgtcacactaaacagagatcagataattaacctgaccccatgatgcataattttaattttaatttcaatttgagttcttaatagaaataatgaaaggctgttatcatattttggttgaatggacacagatctatttttttatggtaccacattgagaatttgtttttttacatatataaatctattaatggtattgtcaaaatactgtcttttttttttttttttaagatgtagtattgctttgtcgcccaggctggagtgcagtggcatgatcgtatcctagtgcagtctcaagtaatcctcctgtcatagcctactgcatagctgggagtacaggtgcacaccaccatgcctggctaatttttttttttttttttttgtagagatggttcttactatgttgtccagtccagtttgaagcaatcctcctacctcagccacccaaagcataggcatgaaccatcaagcccagctagtcttttaagctttgttgttttgaaaataatgaggattattactttgatatcatattagaattttttctaaaaatttaacaagaaattatctttagttctgtataatctgtgggcagctatatctatttataagcatctatgccaattattactttacttctagttgtaatttaaatttgttttagttttcaaggacacagctagtcttaataacttgatttgtttttatttccatttattgagtttagcatttataataacttaaaaaaaattttatttcactttaagttctgggatacttgtgcataacgtgaaagtttgttacataggtatatgcgtgccatggtgatttgctgcacctatcaacctgtcatctaggttttaagccccacatgccttaactgtttgtcctgatgctctctctcccctccccacacctgaaaggccctggtgtgtattgttcccctcccttcgtccatgtgttctcattgttcagctcccatttatgagtgagaacatgtggtgtttggttttctgtttctgtgttagtttgctaaggatgatggcttccagcttcatcagagtttctgcaaaagacatgatcttattcctttttatggctgcatagttttccttggtgtatatataccacattctctttatccagtctatcattgatgagaatttgggttggttccatgtctttgctattgtaaatagtgctgcagtaaacatatgtgtgcatgtgtctttctagtagaataatttatattcctttgggtatatgcccattaatgggattgctgggtcaaatagtatttctggttctgggtctttggggaatcaccacactgttttccataatggttcaactaatttacattcccaccaacagtgtaaaagtgttcctgtttctccacagtctcactagcgtgttgtttcttgactttttaataattgccactctgactgaaatgagatagtatctcatggttttgatttgcatttctctaatgatcagtgatgttaagctttttaaaaatgtttgttgactgcattaatgtcttcttttgagaagtgtctgttcatatcctttgcccactttttgatggggttgttttcttcttgtacatttgtttaagttccttgcagattctggatattagacctttgtcaggtggatgggttgcgaaaattttctcccattctgtaggttgcctactcaccctgatgatagtttcttctgttgtacaaaagctctttagtttaattagatcccatttggcaatttttgcttttgttgcaattgcttttggcatttttgacatgaaatctttgcctatgcctatgtcctgaatggtatcgcctaggttttcttctagggttttaatgattttgggttttgcaattaagtctttaatccatcttgagtcaatttttgtgtaaggtgtaaggaaaggttccagtttcagtattctgcataaggctagccagttttcccagcaccatttataaaatagggaatcttttccccattgcttgtttttgtacagcttgtcaaagatcagatggttgtagaagtgtggtgttatttctgaggtctctgacctgttccattggtctatatgtctgttttggtaccagtaccatgctgttttggttactgtagacttgtagtatagtttgaagacaggtagcatgatgcctccagctacgttctttttgcttaggattgtcttggctatatggactctttgttatttccatatgaaatttaaattagttttttctaattctgtgaagaaagtcaatggtagtttgatgggaataggactgaatctataaattactttgcgtggtgtggccattttcatgttattgattcttcctatccatgacgatggaatgtttttccatttgtttatttcttctcttatttccttgagcagtggtttgtagttctccttgaggagctccttcacgtcccttgttagctgtattcctaggtattttactctctttgtagcaattgtgaatgggagttcattcatgatttggttctctgcttgtctatttttggtgtatagaaatgcttgtgatctttgcacattgattttgtatcctgagactttgctgaagtcgtttatcagcttaaggaattttggggctgaaacaatggcgttttctaaatatagaatcatgtcgcctgcaaacagagacaatttgacttcctctcttcctgtttgaataccctttatttctttctcttgcctgattgccctggccagaacttccaatactatcttgaataggaatgatgaaagaagggatccttgtcttgtgccagttttcaaagggaatgcttccagcttttgcccattcagtataatattggctgtgggtttgtcataaatagctcttattattttgagatatgttccatcaatacctagtttattgagagttttaacaagaaggggtgttgaattttattgaagcccttttctacatctatcgagatgatcacgtgattttgtcattggttctgtttatgtgatagattacgtttattgattgtgtatgttgaaccacccttgcatcccagggatgaagccagcttggtcgtggtggataaggatatgctgctggatttggtttgtcagtattttattgaggattttcgtattagtgttcatcagggatgttggcctgaagttttccttcttttttttttttttgtcatgtctctgccaggttttttgtatcaggatgatgctggcctcataaaatgagttagggaggaattcctcgttttcaattttttggaatagtttcaaaaggaatggtaccagctcctctttgtacctctggtagaattcagctgtgaatctgtctagtcctgtgctttttttggttggtaggctattaattactgcctcaatttcagaactcattattcgtctattcagggattcgacttttcctggtttagccttgggaaggtttatgtgtccaggaatttatccatttcttctagattttctagtttatttgtgtagaggtatctatactattctctgatggtagtttgtatttctgtggggtcagtggtgttatcccctttgtcattttttatgtgtctatttgattcttctctcttttcttctttattagtctagctagcagtctattttgtttgtttgtttgtttgttttcaaaaaaaacagctcctggattcattgattttttgaagggtttttcgtgtctctctctccttcagttctgctctgatcttagttgtttcttgtcttttcctagatttttttatttgtttgctcttgcttctctagttcttttaattgtgacactagagtgtcaattcgagatctttctagctttctgatatgggtatttagtgctataaatttccctcttaacactgccttagctgtgttccagagattctggtatgttgtttctttgctctcattagtttcaaagaacttcttgatgtctgctttaatttcattatttacccaggagtcgttcaggagtaggttgttcaatttccatgtagttgtgtggttttgagtgagttttttaatcttaactctaatttgattgcattgtggtctgagaaactgttataatttcagttcttttgcatttgctgaggagtgtttactaataactttttaaaatatcagtgatttttccaggtaatagacatttatggctttgaaatttcaaagtatgtttaaacaaaaaaattcatcaacaacctcctcccacattctgcatttacatttatcattatcatgtgtgttcttatacttttattattagattgaaaaatatacaattgccattcttatagattaaaaatggtcaaacattggctatttcaaatagttcaatatgtaagtatctcaaaataatataacacatgctgttatctttatgttgttagtatttatgtaagtgctcatatatatatatgcacatatataaaaatacagagtatatcttcaatttgcctttttcataaataatttttctgagaattacccattttgatattttgttcattcattttagtttctctattagtattccactttataaaaaaaagtatggattatgtatttgtttccatgtggagagttagcttttctctttatataatttatagaagattgcaattaatattttgtatgtctccttgtgtgcatttgtgagaatttgcacagaaaaagcacagtgaaaggtatcataggcttcttaagtattcttatcttccattttgatatatcgccaaactgttatctaaagtggttgaaccaatttgccttcctatggcaacaggtaaaatacccatttgcctgtgttatcaacatgttttgttttccaacatttttgccaaaatcatgagtataaaatactcccttattttcgttttaattttaatttctttagtaactattaaaatattgaaacatatggcatttgagttttcgcctctgtgaattgcttgttctggtatatctttcattaaattttccattgcatttccttgtcagtaaaagttacacttataatctgcattttacatgttttaattatattgattgtaaaaatatttccttcagtggtttgacttttaaaattttttgtatttttggtctgtcacacaagagttttaaattttaacattggcgaatatatcagttactttttatggttcagatagttttatatcttacttaagaaattctcttttatcatgatatatattgccttctattttttctgaaattaatttttgtataatgtgtgaggtagagatttaattttaacttatctttattggcacattcttgtcccactgatttttattgaacacacattatttcctcactgatttttaaagccacctctactgtatctcaagctccaatttgatggtagtgtgtttaacatcttgtttcagaggtcaatttgattaacttcttgccaaaagctatagcacttgattatcttttgatatcttgcagtggattccttcttaccagccttcttcagctattgttaggtcttactcctccaaatgaattttaggatcagtttatataaaaatgtttattgagattttttattggaattgaattaaatttatacaacagcttagggataatttatattgttatgctgatttttttcatccatgatcatagtatatcattctatttatttagatcttcttttatgtcttttagtaaatttctataaataaaatactcataacttataataaaagggataaatataaaatttattcctaggtatctcaaggttttggtgctattgtaaatagtatcttttattaaattgcattttatatttattgctgatataaagaaatattataaattgttatatatcattcttatttccaacaccattttggaacacattaattcgaatatttgactatagatttatttgaattgttgaggtagaaaaccatgtaatttgcaaataatatatttatgtcattctaattcttatggattttacttcttttctttgtctgattgtgaggtctagacattcctttaacaatcttggaaaaaaaagcagtgagagcaagcatcctcaacttgtcattgctttaatggaaatggctttacattttttcctttaaataagatgtttgccatatcacgttaaaaactttcccacctattcctaattgtttagggttttctacttgtatattatgtatttttcaagacatggcagatttaatttgttgagatataattttcatgcctatgctaccaagtgagattggtcctgtcgttttcctttctcttaatgtccttgagaacatgtttcagctctcccatttatgacctgttttaccttgggcaaatttcttaatatctatatgcttcagtttcctcatctttaaaattagcatcaaaagaatatctttccatagtgtttttatgaggattaaataaaataatatacataaagcacacagaacagggcctgctactcagtatgcaatagttattagctgtcattgtcatcattaatattaagatattttaaaacacttttcccctaaaatacttagagtactttgatgcatatcctaagatctgtctctggctgctatttctggacatttctttgttgtaatatttctggtagctcttacttgtgactgtgaattgtagacatttgatgcccacagactattcagctctttcaacttctaccttgttcctaaggaaatctgaatcaattcatcagggtctttcctaaagaaatttgtcgaagttatccaatccaatgccacgattatatttcttcttgtatgattgtgtttttgttgtttgtcaaagaaatttttgcccaagtcaaggtcacaaagaattttcctgtaattttttctagctatattatagttttaggttagttctattatccatattgagttaaacttttacataaggtgcatgatatgttttcaggtgctttaaaaaacataagatatccaatattccaggaccgttcttggaaagaagagtattctttttccatttaattttctttgccacttagttaaaatacagtggactgtgtatgattttattatcagcattttcattgctactgaaatgcagtaggtatgcaattgattttcatgtattgatattgcaacttgcaactttgctgaactcatttataattcctaatagattttagtagatttcttagagttttctatgtacaagagatagttttacttctactttttcaatatggaaagatttatttcttctgcttgcctatttgccctgtctggtaactacagaaaaatgttgactagaagtggcaaaagtggacattgttatcttgttcctgatcttagggaaaaagcattttttcaccactaaatatgatgttagctgttggtttttcacagataccctttattagatgaggaagttgtcttctttaatagttagttgctttttaaaaattttatcatgaagtgttaactttgactatgtagctattaagatgatcatgacgtttttgtcctttatttttccaagtttgtgtattacttgattacttttcgtacattgaaccagccttgcatccttgtgataattccacttgctcatgatgtatgatcctttttgttagtactgtatttggttcactagaattttgttgaagacttttgcatctgtattcataaggcatattggcctatagttttcttttgatgtctttgatgtttttggtattagggtaatactggtttcatagagtaatttggagagtgtttcttcctcttctattttttggaagggcttgtgaagtaatggtgctacttcttctttaaatgtttggtagaattcgccaatgaaagcatctggtcctaagcttttctttgtggaaatttttaaaaaattactaatttgatctcttttagtggtatagatctattcagattgctaatttcttcttaagtcagtttacatagtttgtgtgtttcttggaatttgtctattttatctaggttgtctaatttttggcatacagttgttcatagtatcccttatgatccttttttgtgactgcaaagtcagttgtaatttcccttttttaattcctgattttaatcattagagtcatctcttttcttggctagtctagttgaatgtttgtcaaatttgttaataatttctaacaatcaacttttgttgtttttcttgttgtttttctattctctattttatttgtctgctcaaatctttataatttcctttcttctgctagctttaggttgagtttgtttttctttttctagtttcttaaggtagaagattaggttattgatttaataaatttctctttaaatataagtgtttacagctctaaatatcactttaaacactacttaaatcccataaagtgtgatatgttgcatgttcacttccattaatctcaaaggatttttaaatctttttgtaatttcttctttgatcattagttattaggaatgggttaattttcacacatttgttaattttacaaatttgcttctgttattgatttctaattttttctattgtgatccaagaatatactttgcatgatctcagttattttaaatttatagagacttgttttatggcctaacatataatctatcctggagaatgtaccatatgcacttgagaagagtttgtattctgttgttgttgggtggagtgttctgttggtgtctattaagtctaattggtttataaagtcattcaggtcttccatttctgtttgtattctgtgtagttgctctctccatgattgaaagtaggatattgaagtctccactattgttgttaaatggtgaatttttctctttaaatctttaaatttgtcattttactgttgttagacacatacatgattataattgttttattttcctgatggattgatatcttaaaatattcttgtctctactaaaaattttgtctaaagtctattttgtctgatgttagcataggagctcaagctctcttttggttattgtttacgtggtgtatctttcttttcattcttgaacattcaatctatttgtttcctcgaatgtagagtttgtctcttgcagaactcctatagggggtcatgtttgtttgtttttccattttgtaaatatctactttttgattgaagtgcttaagccatttacatttagcacagtgactgataaggtagttacaatgtcactttgctgttggttttttaaaatatgatttatgtcttctaaatttctctattctttcactgtcttctttgggttaaaaagttatcttctagtgtataatttaatacccttgtcatttattctactatgtttgttgcccaggatgttatcattaacatcttaattcataaaaatctaattcaaattaataccaacttaattttaagagtatgcaaaattttgcacctatatagtttttgttcactctgctttcttttgtgccgttattgtctatggagattttttacattggatgcccatcaacacagatatataattattgctttataaagtcatcttttaaaacaaatgtgagagagaaaaagaattacagtaaaaatacatttataatctttttaaatatttacctatttaattacctttacaggtactctttatttcttcatctggattacattgctctctaatatcctatcatatcagccagaaggacttcttttggtatttcttgtagagcaagtctgatagtgataaaacctctcaatatttctttatctggaaatgtcaatttatcctgcatttttgaaggagagttttgctagaaaaaatagtttttggtgtacagtttttttttacgactttaaatatgtcattcttctcccttctggacgccatggtttcttcacaagaaatctgtggttaatcttattgaagatcccatgtaggagatggccttttctcacttgctgctttcaagattttctctttgtctttgtctttcaacagtttgatttttaatgtgcctagggtgtggatctatttgaatttatcccacttgcagttcattgagcttcttggatgcatagattaatagttttcatcaaattttggaagtttttggtaattatttctctaaatattctttcagtccttttacctcttctctgaaactcccattatgcctatgctggtactcttgatggcgtcccacagctttctggggctttgttaatttctcaacattctttctctttctattgctcacactgaataatctcaattgacctgtattcaagttcattaattatttcttctgatcatttagatctgctagtgagctcctctagtgaatttttcatttgaaagttttctattttctatttattttttctttttttgatgaaatgaggtctcactacgtttcccagggtggtctcaaactgctgggctcgtgatcctcccacctcagcctcccaaagtgctgggattacaggcatgagccaccatgcctggctaaaaattttctatttcttttctcatattctatattgtctaaagcatcattgtcatactttgctttagttctttggacactttgttttgttttgtttttagttatttgaacatatataaaatagttgatttaaagtctttgtctggtaagtttaatgtatgagcttacaattgacccatttccattgcccatttttcttcccctgtatattgtttgtaggagtttctttgcatatgccatattctttgttgaaaaccagacattttaaacacatagtgtagcaaatctggaaatcagattatttccctttccagagttgttttgttgctgctatttgtcactattactactgtttgcttgtttagtggctttcctgagctaattctgtgaagtctgtttctttgtcatatgtgataaatgaagtcattgtttgctcatcttagtagtcaggcaatgactgaacagagaatttcttaaatgcctagaaccaatacattttccagtctctggtgagagatctgtacgcatgttgcagaatgccatcaacactgaggcagtttaacactctcctttagtccccacttcctgcttgtgcagagcctcaaagtcgagctgaggtgagaccttaggactttctcaggtctttctttagcatgcgcatatacctgagcacatacttagccttttgcatgttcataatcttgtagattcgcaggcattttttaaggatttgcaaagcgtttatggacatgatgtttcacatcttctccttttaagtattttggattgtttgttgtttcttctgactgttgttactgcctgggtcaactgcaatgttaagcagttgccagtgattatttttagcaaataattgttttaaacaaacagagtaaatgctgtttccagtggatgaactctgagtcaattcaagccttactagtggggctttccatggtacttccaggcagatcgaataatgacaatcatctgaggatagagctttgaaacagctccactcccattctgatcctctagcagtaactaggctgctggttttcaccctgattgcaaactgttcattttcagggcttccagagagtggcagagaggagtacgggaataggaaagctaaaatgccatagaacatgttgttcttaccaatattcagtcatttaaaaaataaacactgtccacattgttgcaagtctttgctttatttccagagttctcaataagttgatgtgatattctttgccagtgttcccattgcttttatggaagacagactcttccattgttttcactctgccattgctgatgtccttttattcgtttcctcaatgtcttatagtttttacctatatacattgccttgctttaatagatttataactaatatttcacattttcagtgctaataaaatagtatttaaaagttttaatttccattggttaatcactagtatatagaaattaaattattactcatttaacttctatcaaacaaaattaactaattcacttgttatttctaatagcttttatgtacagtcatggaaattttctgagtagataattatgctatctgcaaatgagagtttatttctttccttctgattgttgtgacatttgttacttagccttattatctgtttttaccctgatttatatgttggattacttagttttcccatttgactaattttgttgtgccacccagttgtaatgcataacaacttctttccagtcatcacctgtctattttctgactagacagctatgaggtctttcttgtatgagtcatgtctatttccttgatcaatttatataatttagacatatctttgccatatgaatatttttcaaagaagaatttttatggaatgtttatcccaatgaatatctgttgttaaaaaattggcaagtagcaaaggaataagtaaaatttatttctatggctgtccttgaaatatttgatagtattctcacctcaaatcataattcttttatttgggatggatgattcacattaactctaggtctttagaaaacttgctgtaactcttttttatgaagaatttcttcaaatatgaattctttagcaatggatatgattgcaagctccaaaatttaaaactaaaatggtttttaaaggttataaaacccagcccctttattttatagataataaaatagatttcattatccccctgcagcagagcttccctttagctattattaaaatatagggagtgaattctaatttatcagcattgaaaggtacacctccacttctaataccctggtctgactgccaacatttttcacacatatgactgtaatatcctcctaactggcctcttggcttctactcttatcttcctatattctagtctcagaacttttgaataatcctgagatcacatcactcctcttctcaaaaccctccaatggcttcccattttactcagaccagaaatcaaatttcttacagtaggctattagactttgtatatataacaatttgtacctccatcctcccctctcccccagccagctacttgtctgacctaaccttctaataacctccccccttttattctgctccaggatgctagctccttgcacctcctctaacatgccaagcatactgatttagaggtctatgtgcttattaatgcctgcctggaacattttgcccctagatatacgtatgactcattcccattcccctgtcaatgccacattctcaatgaggcctctcttggacataacatccccactaaaatctagccatgctctccaacctgctctaatccttctgtttttcataaaatgtattgcattctaatatactatatgaatttctcattcattatgtttatctacgtgaatgcaagctccataaaagcaagggtattttgttgttgttgttaactgattgtacttttggcactcgtgaaagtgcctggcacataataggcttccaataaatacttgtgaatgaatcaatacgtaaaagaatgaagccaccctgacatttaaagccatggttcaggctttagcaacatcacagtgttcatcagttttgctgtctttcagttatggtaagtctttcaaaattatgaatggctagcccctgtttgttatgatctgggttctttgagataaaacacttccctagaggttatataaaatattttagacaatattttatcctgagaaagcaaattggataacatgaaatgcaggtaatttctttttttctccttgatatctcattatgttggcaaaaataggaaatgaagactgtcagttttccacggctgccatgcaaaagtactgcaaactgggtggcttctcccagaaagagaatgcctaggactatagcggggcacagaaagttccccacaaggagtatttcaaagctgagacattaggggctgtatgaggcagaaaaattggaagcagaggcaaaatgggaaccttagggctgagagagcctgaaggttgtggggcattaaaaattcatgctgtagattaacagtgtggggtgtaaaggatgctaggagaggaagaactgagcatggttagggatagttgaaggtaaagaaaaaacgggacacaggcccagcttccttgacaacattatctcttacctcataaataaaatttatgctatgaggagtgactttcctattcgtctttcctattccccaaataaaagcataggcacacaatggctttgctgtatttgcatgtattcttctcatctttcttctaagaatgacatgtccatctttctaccattccctctttgtttaactttagatcctggatccaggtcaattgatcataaatcatgttgcctggatggccaattaactgaaagaatattttaccatgttttcttatttcttgtaactaattataaattttagaacaatttgtgttggaaatcttctaaagatttctgcaaagttttagtagatttagttttgtcttcataacaccacttggaggaataattctttgcacttgtgccagctgcctgttttaggatagatagagtagagaaactctccctacgggaaagtcagagcaggaggctgcctagagcacatcttcttgtgggcctcagctcatggggtatgtggaagactgagactaatgggtagaaagagagagcctataagtgtatttttcttagactacatcagctgagaatacactaatgaagaaatatttttatatgtaatattttggttattttctcaaatatattatttaatataaatataacatgtaaatatatgaatatacacaaatatatgcatacacacactcacacacagacacatactctttttaggctcctaagtctcacactttgcttgtgagtttcttcctgattctgagatcactatctcagactacttcgtgtgctaattctcctctccatgttttatttatcagccatatcctcactctgtcccagtttcctccaagcaaccaccaaggagcagcagaaaacataaatcaaacattctttaaaactctatcaagacagagtgaaaactgaatagttaaaagaaaaaacacattgggaaaatggtcatttgatgattaaaattgctccaattttatttttttagaactattgaaataaacaattattgaaataaattttgttattaaaaatataacaaaaaacttggagtcggtagtttttctgctttattctgtctccactctcttgggcttatttgtctcagtaagttctgaaaaaatatttgccaaacaaataaaataataccatgtggattaaggttgatagctacatttgccttgaaaggtcacctaattcaaagtagattggtctttgaacctggttttcttagaagattttccctgaggcaataaaattctgagagtgaactatgatactattgatatatgtgaatgacacagaacctacaagtaggaagtcttcgatgagtcctcatttggagattttctagaacagacattaatttaactttagagagaacccaaacagatagcctggagcttggagctataacaggtgggatgtgagagtgaggaatcttccttttggcattgcaaatactctggaaattgcaatcagaagcagatgacaatcaaatttagggctgatgagataatatatctatggagttataaactagagagaaatttgacttgggaagggacttctggagaaagccatgagttcgatcagtaaataggctggccaaagtattcactttgacttaagtcctacagtgtccatggagataactatgattatttttgttattaatgtggaattagcaaactagagattgatctgtaaaagtttcaaagggcagtgacataaatatctttttaaccttaacatcttcaaaggaatatcacttaaatacttgtcaggtattgcttggtaaacagagacttcttatattatgcacatgtgtgtatttgcaggtttagagcagtttgtcggaagaatgcaagattttcgattataccaagtggcacttacaaacaggtaagcagatgttgcattgtaaacctcaagaaccgaaaggataaatgctgaattcacttaaataagaatactatgtagattataccattttttatctttataccatttggcaaacttcacctaattaatgtttacagtgtttgctttggcttagtctatggttgttattcactagtgctactcttgaggaactccttgtaatatgaaattgatcacatttttcctaaggatattctgtaagaaaacttgatatttgaacattttataaaacttgggatacaatgcttaaattttctatatgaggtagtttctattaacaatacttgagaaacttctacatctgccttttttaaattggtttgttgactttatacctactagagaatgtagaacaataaacgtgattaattattttgatacatgggaaattctcaagagactgatctattagacttggagacaagaagaatgagcatttgaagtattgtgatatatttttctattttcagtgaacaaataattatatagactcaggctagctttaatgacattatttccttatcttgagagtagatgggaaatctttcttagggcttcttaaaagcacacagaattttaaaaaatttaagtgaaattctgcttaggatgcctttgaactttcttcttcagcttatgatatcatggtataatagtatattgttgtatggatgagttgatcttatttacttctattaaaaatcaaaaagaagaatgttcattcatatttcttcaaggcagatataaattagtgtggtgggtttccaaatgagaagactagcccttgtaaatttagaagcattgcttttgatgtggttcttagtccatggcagatcattaacaatataaacattctttcttaccaggctatataatcaaggtatgcctcagtaaagggtgccatggccctggaacacagtgttaggtgtatttactgccaaaagccttactatattttagatcacctttgtctaaaatgctgaagggcaatgttgtagtaattctttgggaataaagtttttccttgggagtgaaagattttatactggattctatactggtagcttttggtcccattcaaaacttggtatcagttgaaaagaattgatgagatttaaagaaggtatgacttcatgtgatttaatgaatggaaaagctgcctgactccttcactgctccactggggtctgagaggaaaagcctggtttctctggtaagaccttgattactaattttggcctacctgaaatgtctgggaaggtgctatgtggaagaatgcctataaatagaatgactaattctggtctagaacaagtatattgcccctaatggaaaaattaaatatatctacctggaattggcattctttgactgttggcagccgccatatgatctgaagccaatgaagcattacaggatgtcaggatctgtactgatgagtcacaggaaaccattgacaaatggccttggcctcagtccttcacttaaaacagaagcagataaaatgatacttgctttcgtacttctttcccatggatgaactgaaaacattatctataactctcattgttctccatatattattgttcactctcagtagttagtttagcatcctaagtaaatgtgatcatttctatattatcacaaatagacacggtaaaatattgtggtatttaaataagtatcttaataatcagacaagggcttatgcatgcttcttgatataaataaaaagttaatattaaaatgtgtgggttttgatatacattttatgataatgaatttgtttatttggccaaaaataagttttattttatgtttcatgcatcaaattattaaaactaaatggatactcatgaaagcactaaacgagtgacattcatttgtaacgactcctagaagttctattactgttaagctctttgtccttacagtctccctcttgactcccacagagagattctggaagtcttctctggagatcttctcagattgcatgcccaatcacattgccgttgccctggcagccacccgcgggtccaccctttggcacagcggtactgcattcctaatgatgcaggagacacagctgataatagagtgtcacggttgaatcctgaagcccatcctctctcttttgtcaatgataatgatgttggtacttcatgggtttcaaatgtgtttacaaacattacacagcttaatcaaggagtgactatttcagttgatttggaaaatggacagtatcaggtaatgagaaacgataaggtgtacattaatttcctgtggttattgcaacaaatgcccacaaacttcatgtcttaaaacaacagaaatatattccctaacagttctggagatcagaaatatgaaatcaacatgttggcagggctacattcccttaaagattccagaggaggatccctccttgccatttgcagctcctggtggcccttggtgttacttggcttgtggcaccacaacttcaatctctgcctccattttcacatggtgtccttccttgtttctctgtgagcatcaattatcccttttctttctcttatataaggcccaccctattagacccaggatgatctcatattgacatccttaattatactgcaaagaccctatttacaaataaagtcacatttacaggtttggacagtagtacttggacatatctatttgggaacacaattcaacccactacaaggtgaaaactgaactaggcaattgaaccttgcctcaataaagtagtgtattataatgtatacaataaaaatatctaaaagacaacatgtaggaccttatgtttgagatttgtatcaaaatgatatttatgaaatgttgaaaataattatttttattaagtagcaaaaattaatacaaactaaggtgctttttctaaattaagaagtctctatatatgacatttatttcatagaagtaatgttctttgtttatgtctttatttgcatgttgatttataaaatccttgagcaaatgaacagatacacaattatagaatatgttgcttttaccacagggctatgaagtttctggatgtctaatacatatttgataactataattatgatgaagtgagccaatatatttgaatctaataattccatggtttgatatatactgatggttaaacttaaaactttaattacattaattaactttccattttcaggtgttttatattatcattcagttctttagtccacaaccaacggaaataaggattcaaaggaagaaggaaaatagtttagattgggaggactggcaatattttgccaggaattgtggtgcttttggaatgaaaaacaatggagatttggaaaaacctgattctgtcaactgtcttcagctttccaagtatgaatatttttaaacaattaatttaatagactgattggttattaataatgtacaagtatgctagctctctaggctggtggagacttcccttcaccaccaacttccttgaggcagattctcctaagtcttatccctaaattgggcttaaaactatgtttaaagttcttgtaaaagacattagagtgactcttatttcaatctcactgatgtttcacaatctgattttcagattgtttggcaagttatctatgtaaatagaattttcattatgttttcaaggaactgttttagtgtggctttctatgataatcctgtattgtttatatatgaaatatatggaatatgcttttcctagaatgaataatttaagcttttattgatactgtgtagtaatttctcaacattttgatttctgttttgccaaaaatgtgaatagattttcatgacatcgaatttctttcattaacagttttactccatattcccgtggcaatgtcacatttagcatcctgacacctggaccaaattatcgtcctggatacaataacttctataataccccatctcttcaagagttcgtaaaagccacgcaaataaggtttcattttcatgggcagtactatacaactgagactgctgttaacctcagacacagatattatgcagtggacgaaatcaccattagtgggaggtattattatgaattttgttttcaacaaggtttttgtcatacttactgtcttaacagcacattaagatgtcagagcaagccagatttcaagctttacattttgaaatgatttcatactctaagattttaggggaagatctgtatgtgagtcttttctctatataacattgttatatatatatatatatatatatataaaacgtattttataaataaatatatatatatttatatatacaggaattgattttcaaaagctgttgcttttagaagctatgatactctgaatctgacttagaagtgatttatccaatattttacttgatttgttctggaatataattttcaaatattctcaaaagcaaagagatggagctgaatttggagttgtaactatagcaccagagagtttttaagtacagatcttgatctacctgagttcatagtgcacagttccatgggtaatacttgtttttctttagtggaaagatctgatatgccctaagtagtttataaatgtctgatcataattgagaacatgactcacaatatttaaaaagaaatgacagctgcaaacctaggcagcatactgtctaatatagaaatgtacatatagagtatatttagaatggattgttctggaggaatgataggccttgtgaataaaatatgtctttaaaagcagaccaaaataccagtatataagcattgtttgtttgctaagtcatagcataatgaacaaagcaatactattaaatattcatcatctaactttggaaaaaaaaataaaaaaattgaaatatgttaactgcattctgcagtttattgtcaactttatattcttttttctttcttttttttttttttttgacaggcttttgctctgtcacccaggctggcatgcaatggcatgatcatggctcgttgcaacctcgacttctgggcctcaagtgatcctctcatctcagcctccaaagtaactgggactacaggcatgtgccaccatgcccagctgattttttttttcactttttgtagagatggggttttgccatgttgctcaggctgctctcaaactcctgacctcaagtgatctacccgcctgagtctcccaacatgctgagattacaggcgtgagccaccgtgctcagcctgaactttatattcttaactgtattttaaatagtgtagtaaatgccttcccttggtacgtggttggtatagatataaaaaattccatttccctttagaggttggcttgaaaattatctttacaatacacgggtttggatattggtgacagtccttctgacatttccagataaattaaaaacgtgtatggatatccacacgattaaggagaaactgattttgtatcaattaaatatacaaaaatcttccctgttaaattcacataatgcatatagtcctaggaccttaaatatattcacagttgagttggtgttccttaggagtgtgtgatgctcatgtttgcagatgtcagtgccatggtcatgccgataactgcgacacaacaagccagccatatagatgcctctgctcccaggagagcttcactgaaggacttcatgtgagttctattttatgcatggaaatctaaaaaaaaaatagtagagatggtgactataaattctatgaacttaatcttggcctaacaaatgaaaataaatttaaaaactgatatgaacttaaaatgtcaattattgcagattttttaagaaaaataacagccatcaattaagttgaaattgtagtttttaaaaataatttcagccagagaaattacaactgaaaccaaaccctaaggttcttttctcttttgtttttctttctttgtttcatcagcattatcatgttttataaaacaatttttaatgtgtttggatagcatggcactaaacaaaaaatagtttgattcttactaaagggtatttatacaaaagtatcaataaacaaaagcatcgttagatgaagaacaatgtttatgtatttatgtcaatcaaggttcatttattgctaatatcaggcattttaattaattgaaaatctatagtaaaatgatttatgagttatgttactttagttttctgtgacgatcaggggaattccatagttgaggtggaattttagcttcatctttagggaaaagaggtaagtggaaataaaatcaagaaacattcgttggtaggaatatctagcaacaacatcagaaatagctgatatgaaagacggttcagcagcagtaacaattataccaataatgagagtagataatatagactcttcagtaaatatgtttaagacaactggctgctaatttgcaagaaaataaaattagagctctactgattgtatgtacaaaaatgtatgtggcttaaacttttagtgaaaaataactataaatatattaaaataaagattagaattctatatcttaagttgagggcttttatcagctaagcaaatgaaatacaaacagaaacaaacatctggagctatgaaggaaattaatgacatattctgttatataaatatttaaaattctacacagtataagggttaacataaatgtaaggtagtgataaatgatggattgatagaaaatatttgcatcatgttaacaggtaaagagttaagattcctaacacacaaacatttacaaaatattaagaaaaatataacagtctgataaaaatgagcaaatatatgaacaagcaatttacaaatgaacaaattgtaactttaataaacatataaaagattacccaacctcagttttaatcatattcaacaattgtttttaacatttcaaattagcagaaaatataaagattggtaatatttagtacttgtgggaatataacctttaacacatcactgatgggattgccaattgacacaatagttttggggaaaatttgtccacctctactaaaattaaattttcaaatatagtgaactacattatataattgctgtcattctgaaaagcagttcttcaatgacaagtgtatggaatggtgtattagtctgtttgcattgctgtacaggaagacctgagactaggtaaatataaagaaaagaggtttatttggcttgtggtactgcaggctatacaagcttggtgccagcatctgcttggtttctggtgaggcctcagaaagcttacaatcatggcagaaggcaaagccagaagccagcctcttttaaacagccgtgtctaaacagccatgaactaacagagtgaggtctcactgctgaagggaaggcacttcatgaaggatccacctccataacccaaacatctcccaccaggctcacctccaacactggggatcacatttcaacatgagatttggaggggacaaacatacaaactatataaaatgcttatatttctatcattttgttacataaatatgggcttatatgttagtgcattttagcttttcagatggtagcactgtctcatacactcatgtatgacttgtgaacatctctgcctcttggaccttgccctacacttgtgttttagttagttacttcacttctctgtgaaatttattttaggatattatagagcatcttgctttttaaaaaaccatctgtaaaggttttggcaaattccatttctgtcttctgattcttactctgatctaatttgcttttgactgtaacattagtgagaatagttcaatggtaagaatattatctataatgcagactttctctagcacattcaaaacgtagtcccactcctcagtttcaactaagagtctttgatttagttatggcctactttctttctttctttctatgtgctcagaccaaaactttcatgttctaatttagatattcttttgaatttattttctagatcactactttatatacatctagtcctcaccattagtcaatacttgctttaaaagaagaaatcttttatggttttcttttggatttctaatgcctagagtctttgcatttgatttcattagtatattatgaggaaaaatcttttagaagaactgattttaatatgcttgattgtatggcttatcatattgtcacagaaatgaaattaattggattaacttgattgatttattcttcactgagccataattgtgtgtttaaatttttgccaattttatttgttctagattttaaagttaaagcaacatttattatatttttctactgtcttcttttgatcccttaagatggacacttacttccttataatcagtgatttctttcattaaccttgtcctctcctccacaaagccactaacaccccaattaaaaaatgctttgggatgaatttagcagggcaccttgaactgaatatgtctagtatttgcaagctacagtttggctaataccttcatatgatatgttcttttctgagcttctcttgctttctgttgactagtcagtcggtattagtctctctcatttgcttgtgacgtcctgtcttgttttatctttctgtctttaattgctcacagttaagtgttggatattttctgattcttggatgatttcatgcttccccttaaaaatagagccattaaatgaatgaaggctcatgattggtttcagaagacaagttgggattttcagacttggtctcaggtggtgaatgttggattatgaactagtgaattaattaactataatttgggttgagaatacattttaatgcttcttatttagaccttaagtaccttttgaaaacaaaaatgaaaaactaaactttttttgttattttcctccttgacatattttgatagtttatgaatttagccataaattttaaaaagcaacaaatataatttacttagcaaactttggcaaatgcaaatgcagctgcagggaaaaagtcaatagactgttaagttgaatgatttctcagtcctatgatattttcaataatgtgttgaaaatgaaaaatgattttatagaaacattcataggcatgacattctcctttgttaccattcaaagtattttaatacaagtagagacttacatatctgagaaaagtcgtcttacggtaatttgaaaatatacctattctaatgcttttcttgttgttctactttttaaaattatacgttttaatataagccattcacttcctattgggatccatgttctttttaagacctggacataatccaaaaagaatgtcttcaattccacagtgttatgctatccattaataatattacttaataaacagggcttttgtgaattatattacagacatttggcaaacagatgaaaatgtaaggactgaaaatatgccaattcttggcaattgtctttcctatgagaaagtgtttttagtagaaacaaaaatgaatgaagttgagaaaaggtgaatggtgaattcaggggcaggttcacatatttagccatcctaaggaattttccgtacaaaatactattcatttgtttataaggtcaatgtcacaaattggtggctcacaggtagaaacagtgtttaaacagttttaatttaattttctgcaagagttttcactttaaaatatttatttattcttcaatcttttttatttatttatttttttgagagggagtctcactctgtcaccgaggctggagtgcagtggcatgatcttggctcactgcaacctcagcctctcagcttcaagcaattcttctgcctcagtctcccaagtagctgggactacagctgcacaccaccacacgcggctaactttttgtatttttttttttgtagagatgggtttcaccttgttggccaggcaggtcttgaactcctgacctcaagtgctccacctgcctcggactcccaaagtgctgggattacaggcatgagccaccactcctggccctcaacttttattttaagttcagaggaacatgtgtaggatgtgcaggtttgttacttaggtaaaggtgtgccatggtggcttgttgcatagatcatcccctcacctaggtattaagtccagaaaccattagctattcctcctgatgctcttccccccacagcccccaccatccctaagaggccccaatgtgtgttgttccccgacatgtgtccatgtgttctcataattcggatcccacttgtaagtgagaatacgtaatgtttgattttttgtaccggcattattttgctgagaataatgacttccaactctattcatgtccctgcaaatgatttatatttctggtaatacacagtaatgggattgctgggtcaaatggtatttctgcctctagatctttgaggaatttccacactgtcttccacaatggttgaactatttatactcccaccaacagtgtaaaggtgttcccttttctccacaaccttggagcttctgcacagcaaaagaaactatggtcagagtgaacagacaacctatagaaggggagaatatttttgcattctatccatctgacaaaggtataatatccagagtctagaaggaacttaaacaaatttacaagaagaaaacaaccccattaaaaactgggcaaagaaccctgagttagcgagttgttgccaggggaggacattaatgtcttcttttgagaactgtctgttcatgttcattgcccaatttttaatggggttgtttgtttgagaacagttctcaaaagaagacatatgtgtggccaacaaacgtatgaaaaaaagctcagcatcactgatcattagagaaatgcatatcaaaaccacaatgagataccagctcatgccagtcagaatggcgattattaaaagttaaaaaatgacacaaatttttaattcctcacttctcttaatcagaacatagtctaacactgtgtccatttcctgccatcaacaactcactgattcagggtgacatttaccacatttacaacagtatcactcttgggcttgctacaacattcactactatgtatatccttatacatgggcgacatcactttggtgaactacctggccttgaaagactcggagcttcttaacctcctaaagcaaaactgatggatagattgagacactagaagctagaatacatttttaattattctgagtagagaaagaccagctgttcattgctatattcattgttaactcctatttcttttacccctttataaaaataaaaactcacaaataaccgaaaacaactcaagaaaatctattagcaaagacactgtttactctgagatgaaattaaagccatgcttactttttttttaattacatttttgacatctaaaaacatttaccttggggagcctcactgattctcctctgcactctttgaccaggaactccgatacatttttgtattgtactggcaattttaaggccttgactttaatgtatgatacataccataaatacttcactcatagagaatacttttagaatacttgtcgcatttctttccaagaatgaaaaaaaagcagtaaatgcttaatttactaggctcactttagaactgatttagggtgaaacaaatccaaaagcctagatgctattcattaactttcatacaaagttaaatatttcaaagtagaaattagaaatacatggtattgaacttgcatgaatcattatatatctcacaagttacaaacatgttatttataaatgtttaatttcatttgaataaaaaatagccactgttacttgcatttttaagtaaacttttaattttgagataattatagatttatatacagttgtaaaaaataatataaagacaatttgtgtactctaccaatttgtcccatggtaacatctggcaaaactagtgtttttttctttttacatcaaaagtgtgatttgtgtacaataaaatatacccacttaaaaatatatagtttgatgagttttggcatatgtgtaccctgtgtaatcaccatccctgtctagagatggaatgtttcactctcccaaacgttctcttatgcttctttgcagtcagtgctgtctctgaacccccaatcccaggaaaccaccaatcttatttctatcaatacagattagttttgcctgttccaaaatttcttagcatagtgttatttggtatgtaatattttcgtacataggcttttaaatcccacctcacccccacttttagatcattccctaattacatgtgctgttagctttactgcaacatggtatctctggcccacttaatcagaaatccattataagtatcaaagtgtatatattaagctcataggtacataatacaagctaggaattggaagcctgggtttatctgtcaactaacatatttgcaaagctataatatatttattacttctttttcttatctagtactttctttacttgatctaagagttcaagtgttgaatagaatctagttttaagaaaagtgttgtcagttgaaacttgaatccttatgagttgtctttttcctttaataactacatttacctttcggggctctggccaagagtgatgcaatgatcagtgtctcagccaagcattggcacttcattggctacttagctattctttcgtcattttgtgacatcattacctgcaagggtagccaagccttcacagagcaatttattagtaaccatgaacacttcttattctttggctctaacttatgacccttttataacattaatcatagatcttatgaattaactacaatcaaactatcagtataaatttttgttagcattataaatagcacagccagcttgaaactttttatataataagccttcctaccactcaataatttgaatggtgccaacatcacactctagaatgcttattatataaatgaatatttctgttatttttgaaagattcctttagagcaccaaagtccaaaagtatgaatcatcatgactaatttgtgtcatatttatattatatatcaggctttaccactgcttattttttctctgtttgttcgcagattttaccctaaatatattttatttatattttaattattgtaatgctagtaaattaattcatttttatataactagcattcacacagttcatattataggatctacatttgatatatgtttagtaagtcaaggtaaagaattttctttcctcactgacatgatgatattattaatctttgaaaaacacttgtactagttctttccgtgagataggtatgtgcataaatgcttttaaaatataagttgaaaacatgaaaaagaggttatgagcatggagataaattaagacagccttacagaagaagcaaatagagatagtgaaagtataaacatagtaaaagaaaagataatatttgaagggataagagtaaagaattatctaaaggtgaggaatgacatgatttttctgaatcccaagtaggctaagaaaagtaaatgcatacataggtataatataatgaatccaataatcaccaaagaccaagcagccagaaagacagaaatctgataatcaccaaagacagaacagcatcctaaaaacagccagagagaaaaatacaaagtgtaagaaattaatttctaagacactactgatatatttctcaacagccacaatgaaagccagaagacagcagagtagtgcctttgaaatgcagagagaaggcaaccaagaaatatggaattgtatttgtagtagtaccatcaattagaaacaagaaagaaagaatgcatttttagtttacagatatatatatcaatattatcaccagcagactctcaataaaagaatttttcgagaatacttttcataaggatatataatgtttccagaaaataggcctggtgtgaaggaaggaattgtgagcaagtaaaccagcaaatatgtggataaatatagaggaaaatttactgcgttaaataaaaataaggttatatgtaagaaagagtataaaaagtagcaggataccattaaatggtcattaaaaatagcatttaaagggaaggggtaaactccaacttcagctccctctagccattctgttgcaccttggggtaagaagagcagttactgagaaatacttgtaaagttcacagccaatgagcacagggctcattaaaaactgaaaactaatcctagaatcatagaacaggggtccccaacccctgggccactggtcagtagtggtctgtggtctattagaaaccggactgcatagtaggacgtgagcagctggtgagctatcattacttcctgagctctgcctcctgtcagatcagcagtgacatgaagttgtcataggagcataaaccccattgtgaactgtacatgtgagggatttaggttgtgcactccttctgagaattcctgatgctttgaggtggaataccttcatcttgaaaccattccccatgtgctgccctcacacccagttcgtggaaaagttgtcttccacaaaaccgatccctggtgccaaaaatattggggaccactgccatagaacgctttccctcccctctcatcttaccaccacaccatgaaaggcctgtttgccagagttccctttactcagtacatcatgtctggatttcaacaaaaagttacaaagcacactaaaacaccaaaaacaaacaaacaaagaaacaaacaaacaacctcacagtttgaagagagagagcaaaaatgagaatgagactcagacatggaaaggatatggaaattatcagaccagaaacttaaagcggctctgatgaatacactaaaggctctaatggaaaaagtagacaacatgcaaaaatagatggcaatataagctgaaagataaaaattctgacaaagaagcaaaaagaaaagctagagatcagaaacactttcatagaaataaagaatgcctttaattggatcattaatatttggggacagctgataaaagaatctgagtttgaagatgtgtcaatagagactaccaaaatagaaaggtaaaaagaaaaatgactgaacaaatagagcagaatatctaagaactgtgagacagctaccaaaaatgtaaatacatataatggggaagaagaagaagaagagaaaggaacagaagaaatatttggaacaataatgactaagaatttttcatattccaaatgcagaaaaatcaaagttagggaaaaatatcttaaaaggagcctggctgaagggggaacatctagcctatgaaaaagcaaagataagaattacattctacttctcctcagaaagcatgcaagcaagaaaagtggttaaatagttaggtgttgacagaaaaaaaaaaatccacctagaattctgtatcttgcaaaattatcctttaaaagtaaaggaaaaatactttctcaaacaaaaaccagtagacttttcttgccttgcaagaatgttaaaggaagaacttcagagagagagaaaaaatgatacaggtcagaaaactcagatttatgtaaagaaagggagaacattagagaaagaataaataaaataacttttatttttcttatccttaattgatctagtagataccagtttgttcaaaattataataagaacaatgtatttcattattatagcatgtgtgtaagtgaaatgaatgatagcaacaatacaagacaccagagggaggaactaggaatactttattattattaggtactcatgccaccttttaagtggtatcgtgttatttaaaagtcaacttggaactctcgcatgacattattttgtcttgatagttcaagctccacctgcggttctcccgtcctccatgccaggtgtcaggggctgctctggatgttaactcttccgccccatgacttccagttccaaaatggcggcacagaaacaagctgccatgccacaaccccaccgcgcccctctcccgccaaaaagaaaaattaacaaatatacattgctgagattatcaccagaaattgtcacgatagtccagaactcaaatatgaagatataactgttcccagggccataaggaaatgagaaacaccaagtggatggtaagaaacctgactttcacatttgtagcactcgttaccccattttgcctgacaccaaatatgcagaagattttcctccaactcacttttttctacactggaaaaattaagattgaggtaaacaaccagcttccccagccattctgggttaccggaaagagacctgtcctatccatgcctcaacccactggaagcgtcatgagtgcctaaagggagacatattcctgaagataggcagagacaaagggggatgtaggtctgtcatccccagcctgggaaagtctgctctgtaacttgaccaatgcagacacaatgtcagagtagctgcttagcagcactatgatgcaggaggattatttcactgttctcctcggcacaaacccttaggcagccttcccatactgtcaggatattccctttgggacctctcttgttaagaagggcacaattggattgtttactgaagccaaggcgaacctgggcttaaagcgccccctatagctccctagaggaagcaatttagcagcaaagacatagatgtatgtccacaagaaaaacagcagtaggaaactatgatgtctccaaacagacaaagcagggaaccagggactggccctaacaagacagtaatatgtaagctccctgaccacgaattttaaaatgcagttttaagaaaactcagtgatctccagtagaacacagaaaaataattcagaaattcattagagaaatttaacagagattgaaattttaaaaaatctatcagaaaccttggaactgagaaataaatttaccgaactgaaaaattcactagtagctctcaccatcagaatggattgagcagaggaaagaatcagtgagcttgaagacagaatatttgaaaatatatggtcgaggagaaaaaaagaacacaaagaaatgaagatttcctacaatatatagaaaattattaatacctcaaaaggccaaatgtaagaattaatggtattcaagagggagttgaagaggaaggattagaaatcttattcaacaaaataataacaaaaaattccaaaatttaaaagtatacttggattagttataaatgtatattataagctttatagggcaacccccaaaaaagttttaaaaaggtatagttgatatatttaatacttacaaaggaaagaaaatggaaccatgtaaaaatgctcaactaaaaccacaaaaggtaaaaagtatatagaaaacaagaatagaaacaaagaacaagggcaatgaataaaaagtagtagatattaatccaactatgccagtaactactttgagtgtcaatggtctaaatataccaattaaaagagagagattgttagaatgaattgaagaataaaaccagctcattttataatgccaacattaccctgtaccaacatcagacaaagaaattacaagaaaagaaaaccacagaccaataactctcataaaaatagatgcaaaaattctcaacaaaatattcaaaataaaactattaagcaatgtgtaaaaataattatatatcagaaccaagagggatttatctcaggtttgcaagactggttcagcattcaaaaatcagctaaagtaattcctcacatcaacaggctaaaggggaaaaattacaagattatatcaataaatgtagaaaaagtatttgacaaaatcaagcatccattcatgatcaaaactctccacaaataaggagtagaggagaacatactcaacttaatagaaaatatgtataaaaacctagagtgaacatcatacttaaggataagaaaccagaatctttcctactaagatcaggaataagacaagaatgtttcctctcagcactccttttcaacaacgtattaggaaggaataaaaacaacaacctcatttcaaaataaggcagtaaaggagaacgaaagaaaaaggatatatagaaaatagaaattccaaataaataaacaatcacaacaaatctaaatgtgctgaacatattagaattatgagactgtctggctgaaagagaaaacaacatccacctattgtctgagcagaggctgaattagggcaagagaatgtcttaatcacaaactttacaaaagcaccaaaaacaccctattaagcaagatctataatatttttatgttatatttcaaaaagtcaaatgatttagaaatgtataattaaaaatcaaaattttaagtaaagacacattagtgttgcttgttttatggtcctgtgttattttgtaatgggagctgttgtttctaatcagtccataattcctacctaccagttttataaggttggcatgtacctgtctcatagaaggttttacaatcgtctagaaacagactaggcatgatgggacattatacacagctatttttttaaaactgtagagtgtttattaactttttccatttggctccaaagattggtaaatattttctagttgtatacagaggttcgtatttttcctttgccctcatgctgcaatgcagctcagcatggtacttgtgctgagggtgtgagagacatactcaaaaaacaagcacacttcaagtttgaaaatttaagaaagctagcatgagctacataaatattaggcaaaacagacattactgtttcattaaagaaaaagaggcttattgtataattataaagtataaaattctaagtttacatgcatctcataatatagtttcaaaagtataaagcagaattttatagaaccagaaagagaaattggcaagttctaccatcagcatagaagaatttaatacatctcttattaaaaatgtctttttataaaaagaaagaaaagctacatactagcagttgtcattagcaagacaacacatatataactgacaaaggtaacatttaaattaagcaaactatttgaaaaacagacaaaagaagtgaacaagtaattcacagaagaagccagaagtggcaactgaaatggtcaatatacatgtaaagacatgtgcaactttactggttatcagtaaactaaaaaaaaagaatgtgataatattttatactcatcaagttgtcaaagatggcaaaatctggaaatttcaggaactggtaagtggggactcatacaccacttatgggaaggtgctgctgcactatggaaaacaatttgcaaatgtctacgtggaacactttacagtagtggatatgaaggaatatagctatcacatcaacatgaccagacttctcaaacaatcatactacagaaagcttgttttagaataatacatacactgtatacacttatataaattttaaaatcatacaaatagaaagaagaaactgataaaaggataggaggcaggactaacttgcagctccccctcggacagacagagcagcatgtgaagacacacatcatgaacttttctccaagaactactgcagcaacataccaggaaagccacgagaatccacagatcctttgaaggaaatagattgctgctgcaggctccaggagacagccgaaaaactgtaagtgcccaaagtgtgaaagggggatcttccacccctgaacacatagccttcctggggaacctgaaggtccaggtcacaggtgatggatttggccttacctggagctgagacaaacttagagagctgaacaaaatataagggtaaaggaagcagggggaagagccctgtggactctctcagcccccaggaaaaccatttctgactttgtctcctagggtccttgggtaggactgccagtggaagtggggaaagaccacaaggagaaggaaacttccagatgaactctgtaacaatttcgactgaatgccaactttcctagcagaatctgggggtgagggtgaactgggagtgcagacacagcacagaagttgcatcaggcagggaggtgtgaaacctgaaacccctgcttgcttttccagtggggagacctggagcaggggcaagtcctcagccctgttcacccattgcctggaaataaactcagtgctgttgtggagagtattgtgggagtgagactggccttttgggttgcatgggagctgggtgaggcctttcactgccagctttcccctactttcctggtgacctgtatgatgtagcagaggcagccataatccccctagaaacataactccatcgccctgagaaccacacccccaacactcagagcagcttcagcaaggcctgcccaaggagagtctaagctcagacacacctaaccctgaccctacctgatggcctttctctacctgccctcgtagccagacaaaggacataatctcttgagagctctatggccctgaccaccgcctgagaaacttatccaggagactctagagcaagcttgtatcctccctatgctactgccgttgatgctctcttgaaagcgccacctcctgtctgaaggccaaccaacacaaaactagtgcaataaacaaaaatacaacaaaggaccctcacagagtctacttcactcccctgctatctccaccagagcaggtgctggtatccagggctaagagacctgaagactgatcatatcacagggctgtttgcagttactccccactaccagtctggaggctgctagctccactgggtggctagatccagaagagaaacaacaatcactgcagttcagctctcaggaaggcacatcctggagcacccacatccagggagcacccacatctagggaacacccacatctggggagcaccctgtgggaagaaagaatctgaacaacagcacttgagccccagatcttccctctgacatagtctaaccaaatgaaaagcaacctgaaaaacagttctagtaatatgacaaaacaaggttctttattatccccaaaagatcacaatagcttaccagcaatggatctaaaccaagaagaaaactctgaattcccagaaaaagaactcagaaggttgattattaagtgactgaaggaggcaccaaaggtgaatatgaactcaaaggaatttcaaaaatgttacaggatatgaacagaaaaatctccagataaataaatagcataaataagaagcaatcataatttctggaaattaaggacacacttagaaaaatgcaaaatacactggaaagtcttagcaatagaatccaacaagtagaaggaagaacaccagagcttgaagacaaggcttttgaattaacccaatcaaacaaagacaaagaaaaaaaaaaattaaatgaacaaggcctccaagaagtttgggattatgttaaacgaccaaatctaagaataattggtgttcccaaggaagaagagaaatctaaacgtttggaaaatctatttgagggaataatcaaggaaaacgtccccaaccttgctagagatctagatatccaaatacaagaagctgaaagaacacctgggaaattcatcacaaaaaggtcattgccaaggcacatagtcatcaagttatctaaagtcaagatgaaggaaggaatcttaagagctgtgaggcaaaagcatcaggtaacctatgaaggaaaacctgtcagattaacagcagatttctcagcagaaaccctgcaagctagaaggaattggtgtcctatccttatcctccttaaacaaaacagttattggccaggaattttgtatccagtgaaattaagcttcctaaatgaaggaaaaatacagtctttttccgacaaacaaatgtttagagaacttatcaccaccaagctagcactacaagaactgctaaaagcagctctaaattttgaaacaaatccttgaaatacaccagaatacaacctccttaaagcataaatctcacaggacctataaaaaaaaaacacaatttaaaaaaaagcattcaggcaacaaatagcatgatgaatagaaaggcatctcacatcctaacactaacattgaatgtaaatggcctaaatgcaccacttaaaagatacagaatggcagaaaggataagaactcaccaagcaagtatctgctgtcctcaagagactcatctaacacataaggactcacataaacttaaggtaaagaggtggaaaaagatattccacgaaaatggacaccaaaagcaaacagcagtagctattcttatatcagacaaaacaaacttcaaagcaacagcagttaacaaagagggacattatataatgataaaaggactagtccaacagggaaacatcacaattctaaatatatatgcacctaactccagagctcccagatttagaaaacaattactactaaacctaagaaatgagataaacagcaacacaataatggtgggggacttcagtactccactgacagcactagacagatcatcaagacagaaagtcaacaaagaaacagtggacttaaactatgacttagaacaaatgtacttaacagatatttacagaacattctacccaacaactgcagaatatacattattcatcagcaggtgaaacatcctccaagatacaccatgtgataggccacaaaacaagtctcaatacatttaagaaaactgaaattatatcaagtactctctcagaccaccgtgaaataaaattggaaatcgactcaaaaaggaaccctcaaaaccatgcaaatacatagaaattaaataacctgcttctcaatgattcttgggtcaacaatgaaatcaagatggaaattaaaaaagtcctttaactgaattgtttgatatagtgacacaacctatcaaaacctccatgatacagcaaaggtggtgctaacaggaaagttcatagcattaaatgcctatatcaaaaagtctgaaagagcacaaatagacaatctaaggtcacacctcaaggaactagagaaacaaaaaccaaacccactcttattgacttaataaggaaattaaaaaaagtatgctgagattgctaagatctattataataatgaatcttctatctgtgaaatagtgaaaaaaaaagaaattagtgctagatttgctgtcaaaccacaaagtgcaaaagttacggccgcagtgctagataagtgcctagttcagattgaaaaagcattaaatttgtgactggaagacatgaacagaaaatatgtactatatggaaccaaaatatgtactacatagtacacatagtaccaaacccagttgctgtcacttggcacatagagatctggcatctactggaggtcttcaaatgtattccttgtggaaaacaggactacttactatactactaaattcagatattattagcggagtggaatatatatggcagtatcttgtttctaagttgagtggtacataaaatggtacaattctttttttaattattcataaatttatttttaatatttcagtataatttcccttaaacacaataatatgattgattaatctatcaggaatgtatcacctatgtaaatactcatgctactactaaagacagagtggaggtgactctattcacaatggaataaccattactaaattcatgattactgtgtacatttatagttttactgtaaagattgatcatttgctagctttagtcactcaacaaatatttataaatgccttctatgtgtagtgcattatgctagagtacagccattatgtcttgattacagatgcaagtatttgaaaatattgaaggaccttcatttgtgaaattcaaaaaagattccctggcagacaccaattactataataaatagagatgacttcagtgcaaacaaatgattcaggctaacaattagtaattaacaaataatataaatagtatagacattttaaatcttaaagaaaaatttaaatgcagcaatacttaagaaagggttttttaatttactaatgtagtaatcaagtctaatactacaaaaaatttctaatatgaaataccctttatatttaaataatcaaataccttgtataccagttgactaagtttagaggaatcttaaatattaaaaaacatcaataacgccttatacttcttagtatgtgaattcgtatttgtatgatgtatattattttggagagttgcctgtaagcaccatattaatataatgaatgaagcttttcttcattgaagtcctttgtaaaataatgcaggttatcctgaataaatatggtctctattccaggccatatttcctggaatatcaatagggttaaattattatggttgcaataaaatagaattgctttatcttgtccactatctacaatcttgaataaactttaaaatcctccttctgttctcttaagggaacgtggtgtgtccccatgtgtcttttttatttagtgccctgaacaatccataaataagaggaagaaggaataaagaaggacagagatttcaaaggagaaatcaaatacctaacaacatgcagtattgaaaattaacaaataagaatgcaaggcctctcatgcaaatggttccatctcattcaaccactagacataattacttctgtattcacaaggcctacagtaaggaaatactgtttaaaaaaataggctatcaattatatttatatatagacaacatgtagactgaaggattatccgaataatcctgcctagagtttctgtttttctaaatataggttttatgtcacgtattacaatttgtttcattggataattttccaatcttccatttcactttacccatagaattagactaggcattacttgaattagaatgtttctaaaaatagccacttatattaatagttgaaatattgaagtaactatgtatgatgtgtttgtcgtcattgtattgtcacctatgtttgatcagtattgtccaacagtattagtagttatttattttatgctattaatttcagtatctagagagtgagtaagtacattgtatctgtgaacactttaattatgtaagaatttctagccaagggaaagataattactgaaaaagggatatgtcattgaaggataaacacgtggcatttctgtcttctcagtggtaaagaatagtatttgttttggcttttccaattgaaattacataatctgtaggtaaaaattcacaggtgaagtattattgcatttgcctttaaacctttaatgttactattcaattaaatgctagtcacattaaagtacagtcctgtaatgtgtcataaatgcaatgagtctgttaggacattcactcacacattcaccaaatatatatgatcacctcccatgtgcaaagcacagagccattttctgtctagattctctatgtagttgggcactttatctgtgttcccctctgaaatctatcactgataataaattaacaagtttgtctaacattacctttgccatgggaacattagagctacctagggacacttccattggaaaaaagatacctgagtacactaaagtttttatgtttataaagatgatttctctacctagtagacaaatcacagtgaaactggatcctttgaattaccatggaattgctccagccagaggaaaggggaagccttgaatagagccggaggacaattactattattagagatttaggctcttaacatttccaacatagggggctggtttctactgatgagaaagggaaaatgtacagattttcagagggtctgcaattcattcaggccatctgggaatagttaaaaaaattacctcttttattcagtgagcagtactgtaacagtactaaaaagtgatcattttataatctttcactttgaagcagattgtctttctctccttctcacataggcagtgctgcatccatatctctaaattttatagccaggagtggaataactacatcttttggtttctagggctttgctgtccagtttagactcagcagaaagtaaagatggactgagccagagtgactccagtcaacacctctctccctcgaatactattttcggtccctgaagccagtataaacatggagattagaagtgaggtctttgaaggaaaacatccagatatataaattgagtacctactatgttctagggctccttctaggcacttcttcaacatattgaagacaagttgttttcgatgactcattgtgatcattatgaacttaagcttccaaaggtcattgacactgggagctctcaggaccttgaagggaaattttctccctagcccccagccttttgcaaggacttcatatatctttgtctaagaggatatttttcttccttcttttttcaaagatacatagtaggcatttaagattgttgtataagtgactgaataaataaattgctcttgcagttaaattacttaaacttgtattttacacaagtttctactttctctgtaaatttgaaggtgttaagaaataagtaaaattgagtgtgtggcttgtcatggtggctcccgcctgtaatcccagaactttggtaggccgaggtgggcggatcacttgaagtcaggagtttgagacgagcctgggcaacaaggtgaaaccctgtctctaccaaaaaatacaaaaattagctgggcatggtgatgtgtgcctgtagtaccagatactcgggaggctgaggcatgagaatctcttgaacgtgggtggtggaggtttcagtgagcccagatagtgcctgggctccaacctgggcaacagagcaagactctgtcctttatctccaaaaaaaaaaaaaaaaaaacattgagtctatcaggagtggagttgataaaaatgctttggagactatgggttatctttgaaagattgtctttgctgctctgtaatggtaacgaagaaacactatacttcagtttaatgatccataagaaataactgtcattgtgtattattagaatataatgtaataaaataaatttcatcagtgtcttctagattcaatgactattcaatgattttcatacctgaacatgtcaaagtatttggctgcaacttagcggagttgattagtagcctttaagaagctatcaaaatgaaagcagttaaatgaatcagtggtaaaggtccttgaccctgatatagccattgtctaatctcataatttgggcattcagggacatatcgggggaatccagttgttacagaagaaaccgaaacataattgaaagtgacaaatgatcaactggagattgggaaaacatgaaatagaaaaccatttgcttcaggagctgcctaaaatataagatacacacagagttcttgattttaaatcaaactttaaaatcactggtagaaaaggcagttgaaaattatgagaattcaaaaatttacttataatgcacttaccaattattatttcttccattttgtcatggttatccttgtattatctgaaacgagttgttaagaaccaattatgggaccaagaatttaatacttcatgaaactttataatcaaagaatagactacaaagtattccttctgtctttgcaaaccatacaaaatgataatagaacagtatcatctttaggatcaaagacccaaataggcattggtgtgtcatttagttgcatatgtcttaaatcaaattttaaaacaaatttaggcatcatctctcaaaatctttgcttctgtatattaatcccattgttttggaaaaaatgtatattttttacaaatcatactctgtttactggtggctcaaaaactttttagcttacatagtagttgaaaagagaatcattttttctgcagatttttgctcatctgtgtgtaatttaaaactgaaacatattaattttcttaggttttcttagtgaaatgttacatgcaaatgatgtataattatcttgtaactatccatgcagttacattttatttgctctcaatttttaatacattagtaataaatgtacactgtggaaaaaataaagttataaactttatctgtaaacctaccacccaccggtaaccccagccaataatcttagtttatatactttcaggcattatattattgttattattagtaaacctgtctcatctgtctctatcttcttaaaattgcatatttatatctatagataagtccacctttatctagaatagaggattatactctgtatattatttttaacttgattttcaattcaagctgtattatgaatatatttctctatttatatttataaatgttagcctttttttttttaggaattggaacatcttaaaccactctcttgcttttgggcatttaatttgtttccttctcttcagtattatcaacaccccattattaaaacagaaaatctttatcaagcagctttaaaaacatattctcggacaggcacggtggctcacgcctgtaaacctagcactttgggaggccgaggcgggtggatcacgaggtcaggagatggagaccatcctggctaacatggtgaaaccccgtctctactaaaaatacaaaacaaattagccgggcgtggtggcaggtgcctgtagttccagctactcgggaggttgaggcaggagaatggtgtgaacctgggaggtggagcttgcagtgagccaagattgcgccactgcactccagcctgggcgacagagtgagactccgtctcaaaaaaaaaaaaaaagtattctcctaaattctcagtggaatttctgggtcctgtggaatgtatacatatgttgctcctcctaaaaggagtggataaactcctctcctacaagcagtgttctgcactggccctttctacaaattcctttcaccctggtattatcataatctaaaaaataataatttgagaatcaaaaaataacagctatgcttgttttcttcaggaaaacagaacaggttatccatatatctgcagggtttttttctccacaaaagaaaggccagccattttcaataacaagtagtttggcaggaccagaaccattccattgggtcactggtaaaatttgtctttggctttaaacattaaggcagccaggactgtgtctttggacattgatacagcatttagtccagtcttatttacaattaggctttttgataatggcttttgggctgacgttaagtataaaatctgaaattagattttttaaagattataatcaaaaagcaaaaatgtcttcctagaaatagcaaaggaatgcttttgctggatttgctccactaactcatgtaggcaatataccaaactcaaacagccagcagttgttttgtaaaagacaaactgcatctgaaatcagtatgacaggaccacagtttccatctcatcacttccaccaacttacatttaagaaagcacaacttgaataataaaaaccaccatagagtaaacaaattcttcaatgagaatgctttgaagtcaagagaaaaataggctcagggcattgtgttacagcaaaattttgcctttggcaaaagttttacgatggaatagggtttttaaaatattgggaatcaggtaaattgcatggctaattgaactggggaagacagcttaatgagctcatttctctccttcaaatccaagaagtcagaaggcaagttttcatctattctttcatttatccaattagaacatatcgtccccacacatagggctactagaagaagtaatagttatgtctgatggctcttaggaagtattgtcaatagataggacctcctctgtagttataactacagatgatcaaattaaccagaaataaattttggtcataaatttcttcttgctccactctgtaggctacctcctccaaagcagatcgtagaccagtgcatttataaatcacagaatcaccttttaatggttatagactatatatagcatagtgacagtcatatactgctggtgctggtcaaacttgagatcaacaattctgttggatttttacccctctcttccttctttttcctcctcttccatattctgactttcaggtttgagcatgtaataacttccaggatttgttttgggcattatttatatattaccacttatcctaagattattttgagtcagataaaagtaagacattctattaagttatcttcattttgaagatgaagaaactaagattcatagaagtaaagaggactctaggagtaactaactgtccattgtcattgttaatgttacttaacctctttaatcctctgtcgtgaatccaataacgatcaaagtagtaggcaagtttgctgagggccaactgtgtgacaagcactttgataactgattggtctttacagcaaccttatgagagaagtattattactctcatattatgagtgagaaaaataaggattaaagaggtacaggcaattactcaagaacacagggctagcaaatcaagaaacagaagttagatgtgagatattgtatcacccaggcctaaaagatgcaatgaaacaacccattttaaatgtttaatatagtaaccagagtatactctcatttgatgagagtatactcatcaaatgagagtatgcatttgatgttacttttcacagtggcctttttgcagttaggaaacagcagcaccaataatagaactaagctgtctgactcccagcctgtacctaaatctctaacttttgattttatgaaataaatttgatttgcagatgggcattgctggtgagggaaatgtaaagaggtcaatttccccactttaaatttttttggctaaagacccatagctgacaatattttaatggttgccacatattcttcttttatgaagtgagtttcattttatatttgtaagtggtttttattgcaaatcatcacctaacagtcaattctgaagactttccataaatgtcaccttgtttgtgaattgttctcattctgtctcctctctaaattccctcaagaacaactttctttggacattaatatcattattaattgtgaattgtcagctaacagcttagcaattgtctatcatgctcctaatgcatggatgatacagagaatataaagtcaataacttgtatttcctgaaagatacatatacagaagccaatcatttcagtagagtgacaggagcaagattgaggtattaatagagtactctgagagatgagaagcgggacaactaccttagcctaaaggtttgcaaatgattgtggggaaaaataatctttatcactccaaaaagaatattacagtgatattttaattgaccatagagtttaacttgaccattgtaaaatgaccaaaagggtgaattattttttaccaattattaaaaagtagcactacctgatataaacagtgtgacctaatgtttacattcttattattttttctcctttttgtctttttctctctccccagctaagtagaaaaaactcactttgttttcatgctaaaattttggaataccattaaacagcaacacactggacaactacattcttatgttttatcttctccctttaagattgttaaaggaagaaattgaactagtggggaaaagtaaatactggccaaaaaaaaatgcttttgactagtgtatgttccaatgatgattatgaaatatgtcaaactgttctaaaatactaaatatgtgttactatttattctgtattaaaatagaacaatagaataacctttgttgtcccaatatgaaaatagtttttaacaatgttaatataaaacaaagagcaaaggaccattatcttggataaacagagagacattactttacatggtttgactcccctgattcataatttaacatgtaactctggcatatgctgggcacttagggaagtcacattaagtatttcacagcaaatggagagtgagaaaaatgattttcagaaatcctggtatttacttattataaatcttgtcttgaatttattgtactttacatgaaatataatttgataaaatgtaattggtttcagtgtgtatgcaaaatgagaattttctgatcattcagatatcaaaattaactttataaatacaaatacatataattacctattaaaattctaaggtgtatttattttaataaaagtctttatcaaacctagataaatctcatttatgattataaatgtaaaactcctaaatttttttttacttggctttatttactattaatgatgttgggtttattaaaaaatgcaagcacagactccaattagcctactaacctattgtataatttatcaattcaataggtcaaacaattaaatcagaacatttaataaaattgacaatatttttttatttttttacaaaaatccatattggttgttttgaagtagcaatttcttcttcaaaatgataaaaattgtctatgtaaaatcaatagtcaatactataaaagctgcaacattatagacattttcattaaaatgagtaaaaagataattatgcctatcacactactataccatataaattaactattatgctgaaaattctggccaataaagtaggggaaggaaataaatataactgtatatttaaaattatgaactaaatcttcactgttttacaggcaaaggaaaattctaatatctgataaaatctttaaagtcaattaaaaaagagtatactaaagaaaaatgaataattttctcaaaaaggactatatctaaccaagaactaggtgaagattggcattactagtatccaaagacataaatactaaaacagtaattgacatattatctaaaatcaaaatagtgaagatataacaattatgggcagaacacaagaaaatggacattctcagatattgctggtgtgagtatgagtttaatttttctagaaggaatttgaccatatttaacaaaatctttaaaatgtttatactctttgataatgtaatttcatctcataattttcttaaggtaatacttagatatatatccactcccgatccccaaaataaaatggaaaaaaaaaaactaaatgtgtaatgattgcagaagggttgaatgttattttatgagaaatataagaaataatgcagcaaaatacatgatgtttaattatacaaaactatgtagtaatacaaaatatatgatttttaataacacaatacccatgtatattcataattttgaaaagaagaaatatatgcatatacaaatttgaaagaaattatctcatgttgacattttgacttatcatttgctagtcaaattaccagtgcttttaattttctacctcctgcctttgttttataaagaatatttttattatgtctatagttatactaaactcagttcagttgaattgttatttaaatctatggaaaaaattttgctttgtccataaattgtatttatattagaaagttaaaataattaattataaaacatatatccaggtttttttatttgttccagtacataacagacctattacataatttgagtaaattttgtcttacagttatacaggcagttctctccttacacaattctgatatgcatgaatatcagttatcatagtttagttaaatgctaacagtcctccaacaacgtaactcaagtgttgggtaacattgaatattactgtgagtaattacataaacaaacattgctgctggctctgcagtccacaaattaccacataaaataacagatgcacattgtgatcagtgaccgatcacgtttatttttttcagtatctgttggtgattgcgcactacacatttatcattcagtttatttatagaagagaagcgtgtggttgtgttgcctccttgtgagtgataaacccgagtgacactttacaaacacagatattcaaaaaagaagaggaattggacagcaaagaggaaagcactgcaaagaaagaaaatacttgaagtaaaattcagattgaacctaagtggagtcatagaagaaatagtcactactgaggtttgagagattctgaatacgtagccagagctacttagtgaaggtgaacttaacataagtgagggaagtgcttgccacaaatagggtgaagatgtcctggaggaagtgacacccaaacacttcacattagaggaattctcacaggtacttcacaacactaaaagcataaaagttaaaatgttggaagctgattcaaacttagaaaggagcgtgacaattcaccaaggcatagaaaagaagtggccgggtgcggtggctcacgcctgtaatcccagcactttgggcggccgaggtgggcagaacacgaggtcaggagatcgagaccatgctggctaacagggtgaaaccccgtctctactaaaaatacaaaaaattagccaagcgtggtggcgggcgcctgtagtctcagctacttgggaggctgaggcgggagaatcgcttgaacccgtgaggcggagcttgcagtgggcagagatcatgccactgcactccagcctggggaacagagtgagactccatctcaaaaaaaaaaaaaaaaaaaaagatgcttgtgttcagtgtgataagttataggtgagatgaaggcaagcactgttcaaagtacttttagtgagtattttacaaaggactaaaacaacttctccaagtttttaatgttttaaattacagagtactaaataaatggtcatttttactggtttatttctttacatttataaccagcattggagagttgttaacatgttgaagttttacaaagtcttagagctatcataacctttcctgttgattattaagatcactttgcatgtttgtaacacaaaggttaaacacttgaggggatagatgtcgcattttccaagatgtgatgattacacgttgtatctctttttcaaaacatcccatgtagcctataaatacatacacctactacgtacccacaaaaattaaaaattaagaaaaaaaaagatcattttccatggttcaagtttgcatggtcacttttacaattccaccctaccatgcccgtaaatatgctatttctgacttacgaaatatttttcaaataaaatcattgctgacttttaactcactgatatgtgctttacttctggtgaaaggcctaacatatcaataaaatgaaagaaaatcacagctttattttctttactgttctgatattttttgttctagtgtgatcgctgcttgcctctttataatgacaagcctttccgccaaggtgatcaagtttacgctttcaattgtaaaccttgtcaatgcaacagccattccaaaagctgccattacaacatctctgtagacccatttccttttgagcacttcagagggggaggaggagtttgtgatgattgtgagcataacactacaggtaagtagcaaataaattcctgagttggtttggaggcctgtgtgcttctatctacaatgcatattattttaaattatgttattgctatcttatttaaggatgtactttcatacctttaagtttgaaaatcaaagctagttcaccaaatcttcctatttccaaatcactaggtagttttcagaaatagcactctagtcttaaactatatcttttcaggaaaaggattttgttgttgttgttttgttttgttttgttttttaaagagttcacaccatttgactaaaccacaaccatatttagaataactcgggaatgcttactttgaacacatatccttaaagtaagtttccttttgtcccctttattgtcctttatgtctggattctcatgtggagatggcattcattcagatttggcatggacactggtagtctgagaatactctttttgaaaatactaattaaatggagacgatgataatcaaagtcctgttctaaaactacaaagcctttgactagtcattgaaaaataccatccttattttgaaaggcaagaaatggccaacatctgaatttgtgaaatataatagcatatatctgatgggtttcaaagtggtactcttaagcatgaatccatttatcggctgattattgataacttaaatatcacaagatcttgggtaggtgctggggacatgaagatgaataagacaatgaattttctgtctttgggttattgtacagtgggaaagacagactattgaaaggaatgattacaaagttgtctgatgattgctaagatagggcaaggacagtaggagttaaccagttgaaagattaggatggtgaactaaggcttacaattagggaaacattttgtgcagtggcctagaggagggagaaaaatgacacgtttgaaaaaccataagatgggcaaatggctggtggtaagagatattaggaaggaaggcaggacaatatcatagaggactctggagccatgataaagcctttggcttttatctaaggtcaaggagatgacacttaagggttttatatgggaaaggggcataatgagttacttgttattaaaagatacacctggttataaagtaaaaaatggattggagaaggttagagtggttggggaaaactagttagtgaggtgctgcaatagtccaggtgagaaataatgtcagaatacatttcagatggtacggatagagagaaatggatccaagagatatttaggataaaaaagtgagtgttttgtgagcagagtgtaggcaagggaaggaaggagagccaagactgatacctaacattacattctagcttgagcagtaggctcaacattggtgccagccattgagatagaaaatacaggaggattgagatgagggaggagatggcaagttctgttgtggatatgttcactcggtttctaagagacataggagaaactcctgggggcagttggaaacacagttctgaagctctttccttcaaggaaatcctctcatgatgctttagagaagatcagaatcacttacacatgttagtgacaactatgcttatcatggtttataaatgtgtattactcctggtattatttagttcagattcctcttacctcctagactgtaagagagctttgtgaaagagatgcaatgggtattgtgtatttagtttactactgtattacacagcacttagcacagtatttggtacatagtaatcacgcgataaatattcattaattcataaataaaagagagatttctggattggagatatggatttgggagtcaacagcatatgtaaatggaaatagtctagaaatattataaatcaatttaatttttaactagctcaatagccaatatctatcagaatatgagttttcatattattgattattgattatttctgtagtcttcaaatattggagaaatttcaatattttttgagcaaagtacatcatgtttaaagggggaattgatagtcttgagttctacttcagcttatttcaattatcttatacactagtcacgttcactttaaaaattccttgtagtttaggttttttattacataatatagcaaaggaaatttgtaattataaattataaactatgggaattacctgatatatctaatatgtcaggctattctagtatttagtatgaaaagtacttggtatctctaaatataatgaatttctatttcaatctttgaaatgaaaaataatggccactaacataatcatttgtttttaattgtgttaactacagaataataaattatattaagagaagtctcccattttacatgattgagttctagaaaaatatttccaatactacatacctgcttgcttcttactgtataagtatcatctaccacatatgtagaaatttctcctgctgtattgagtttagataaagtgcctggccccagatataaagttttaagtttaggagcaaactctttccaaatgtatgggcccctataaagcacagctttttagaagtgtggtattatataacagatgggagtttaatgaagtaaagcacagtttgtaacaggttcattgtttcatatgctctggatcactaaattggcaggtagagatgaaaggtgcattaaaacggacgttccgaaaattatagaattccctcaaaggaatacagtctttaattttgaattatgcagctgattttaatgaattagaagtcataatgcataacctttccctgatgcaggaaggaactgtgagctgtgcaaggattactttttccgacaagttggtgcagatccttcggccatagatgtttgcaaaccctgtgactgtgatacagttggcactagaaatggtagcattctttgtgatcaggtgagtttttctgagtatttaaggtaaaggattactctgtctgccagaaacttatttggatgttattccactagtagaattgaagactgcatttgccaggaaatcctctatgtgcatttgcatttcaaagagatggttgttcgtgtgcaactttgagtatggacatgaaatatagcactagttcggtggtcctttgcatataaaaaggcttattttagttttaattttacaaatgtcaaaaaatcgaagggtaggggttctaagtaaattggggtatatgtcttggaattattggtgaattaatattaatacatgatataaataaacaagaatagtttctccaaaaattccatagaagatcatatagcaaaagtcacttacacttagggccaaatggaaattatgatagcctcgcttctcaatttcttagtctaactttccctcttaaaagtacaatggattttttataattttaaaactttctgtttacttacatcacaaatatcgatgtctagcctacatgcacacagattctaactaacctcagttcatgtatcctacctcaagcaggaaaacaggcttcttattgaagctgaagtttttcctgttctgataatactaataagtgaaaattgtgaaaatcggtaaaggagaaatttactttgaagaatcaattcaatgattgtattaattttaaacagttatatactctgttatgaataaataaggctaggagcataaaccacaatccagttatagaatatttgttaaaaagttatattgtgaacataatacacacaagacaaaatatctttctcctataattttgagaattcattaaaaattgctttcccaaataaaagacaaatataaaccaagacaaaatatggattcaaagaccttcagagtaaccatcatgtgtcaataagggggcattacatgcttcattagaaagctgaagagtagaaaaattattaataaagacaatttctactatttttattttataatattgagggactattttctcagaaagtcatactacagttttccatatattaattagtaaactctgactgtatctttagattatatttcatttttacacatccaccctgagttttcagcatggctatcttttgcttatcattcaaatattgatatatcatattttgagatatctttgctgaccacccaattacaaaacattctcaagtctttcatatcaccatgttactctcattacaggctctgtaaaattaatttatttgtttacttttcttcttctctctttccaacataaacagaacagtttcgatcatataaaaagcccccaataagtatttgtcacataaatgttgaatgaataaagagagattatctgagcactgatcttatagttagattgttattttaaacggtcattacaataatctgagcattatgtaaattttcacttgcagaacagtttttctccctgaaaatctaaggtcaagagctttgttatatagtataggaagactgtaaactatagttttacctcccagaatctcagttacgtgtctaacctacacgagttacagtgcatcagatttgtctctccatttcaccattcagatctacaagaaattgaaacctgatttttctgaactcaaacttctatttcaagtccgttttatagggatgctagacaaccttgggtggttctgtgcttgtaaataattaacaactgactaagaaaaaaaaaaggccaccataatcaatttcaatctaccagtgagatgtcactgaacatggatttcagaagaaatgtacttaatctgctcttatgagccagtgcagtgtactccagcatactactggctctagatttctttcttaacatcttataaagtggagctaattattggatggaattatgaaagactgtaccatttataagcaggatattagctgtagatagtgttattttttaagttggagaaatttttctctattcctagtttttctgagagtggtttttatgaatggtgttgaattttgtcagctgctatttctgcatcaattattatgatcatgtgatctttttttctttagtttgttagtgaagtagaatacattggttgcctttcaaatgttgaaccagcattgcatccctggaataaaaccacctttgtgtgtgtctttgtgtgtaattcttttcatatattgttaaattttatttgctaaaattttgctaaggattttacatctgtattcataagaaatattgctctatggttttgtttttataaattgtgtttgtttcattttgttattaggataatactctcgtaaaatgaattataaaatcttccttcctgttgtttttctataagaaatgcagaactggtgttaattactctttaaagtttaccccattctaatacatagtattctagtaaatacagtaccccatgtattagtccatttttgtactgctgggaagaaatacccaagacagagtaagttgtaaagaaaaataggtttttatttatttatttatttatttatttagagacagagtctcgctctgtcacccaggctggagtgcagtggctcaatcttggctcactgccacctccacctctggggttcaagctattctcctgcctcggcctcctgaacagctaggattgcagatgctcaccaccatgcctggctaatttttttcttttttttgtatttttagtagagacagagtttcaccatgttggctagactggtgtcaaatcccacccacctcagcctcccaaagtgctaggattacaggcatgagccaccacacctggccagaagaatagatttaatggacttacaattctacgtggctgggaaggcctcacaatcatggctgaaagcaaaggagaagcaaaggcatgtcttacatggcagcaggcaagagagaagtgccgagtgaggaacagggaaagccccttttgaaaccatcagatttcatgagaactaattcactatcattagaacagaatgggggaaactgcccccatgattcaattatctccacctggttcctcccacaacacatggggattatgggaactacaattcaagatgagatttgggttgggacacagccaaactcacacttggcccctcccaaatctcatgttctcaccattcaaaacaaaatcatgcccttccaagagtcccccacagtgttaactcattccagcattaactcaaaagttcaagtccaaagtctcatctgaggcaaggcatgtcccttctgcctacaagcctgtaaaagcaaaagcaagttagttacttcctagatacaatagcggtacaggcaatgggtaactacacacattccaaataggagaaattggccaaagcaaagggcctacagtccccatgcaagtctgaaacccaatggggcagtcattaaacctcaaagttaccaaatgatctcctttgactccatatcttacatccagggcatgctgatgcaagaggtagctcccacagccttgggcagctcggcccctgtggctttgctgggtacagccctccttctggctcctttcacaggctggcattgagtgtctgtggcttttccaggcacacgatgcaaggtgttggtggatctaccattctgaggtctggaggatggtggcccccttctcacagattcaccaggcagtaccccagtggggactctgtgtggggggtctgaccccacatttcccttccacactaccttagcagaggtacttcattcattagggctctgcccctgcagcacatcctctgcctggacatccaggcatttccatacatcctctgaaagctaggcggaagttcccaaacctcaattcttgtcttctgcacacctgcaggcccaacaccatgtggaagctgccaaggcttggagctgccattctctgatgcaatagtctgagctgtatgttgatcccttttagccatagctggagcagttgggacacggcaccaagtccctagactgcacacagtgggggggccctgggcccatgggaccattttttcctcctaggcctccaggcctgtgatgggaggggtgatgagacatgtcctggagacactttcccccattgtcttggtgattaacatttggcttcttgttagttatgcaaatttctgcagccaacttgaatttctctccggaaaatgtgttttgcttttctactgcattgtcagcctgcaaatttttcaaacttttatgctctgcttcctctttaacacttactacttagacatttcttccactagataccctaaatcatctctttcaagttcaaagctctgcagatctccaggggaggggcaaaatgccaccagcctctttgcatagcaagaatgacctttactccagttccccacaagttacttatctccagctgagaccacctcagcctggcctttattgtccatatcactatcagcattttggtcaaagccattcaacaagtctccaggaagttccaaactttcccacatctttctgtcttctgagccctccaatctctttcaaactttcccacattttcctaccttcttctgagccctcccaactgttccagcctctgcctgttacccagtcccaaagttgcttccacttttttgggtgtctttacagcagcgccccactacccagtactgatttattgtattagtccattctcactcaactataagaacaaacctgagactgggtaatttataaaggaaggatgttaattgacttatagttcctcagggcgggggaggcctcagtaaacttacaatcatggcagaaggggaaacaaacacatccttcttcacatggtgacagcaaggagaagtgccaagtgagggtgggggaaagttccttataaaaccatcagatcatgtgagaactcactatcagaagaataggatgggagaaactgcccctcatgattcaattatctccacctggttcctcccatgacatggggattatgggaactacaattcaagatgagatttgggtggggacacagcgaacacatattgctccagtaaaactatctcagatttctttggaaacagaaataatttattattaattcaaaattaaatactacatatatatgtacatatatgtgtgtatatatgtatatatatagagagagaaagacagagagagagatacaaggaaatgagagtcatattaacatcattaggaatttaatattactagaagacagttcagaataaccttaaaatcccaaaagaagacattttgaagaaaaacttgatactcagttctatccaagctatggcaccaacatgaggttaagattctttttgtacgagagatggtcaaaacattaccattcataaccccatattaaaatattcaatatgcaaagtgaaaaaggaatgtaagactggggacaacattaaacaaaggaaatgacaaacaattatgatccaaagaaataaatacataagtcaaaaaatattttcaaagtatccattggtctttatggtctgcaaggatagtttccttacatacatgtttagtaattcaattttatttaagatcaaatcacaattttttgtgatttgagataaacaaataacaagtagagggctaaaaatactatatccaaatatttcagtgagaaactggatgcttttttcctaagatcaaaagcaagataacaatatcccataacattgtactgaaagttgtagccaagaaaatgaaataaaagacattgagactggaaaaagagaagttatttgtatttgcatatgccattatcttatagatagaaaatcctaaggaattaattcaaaagtattaaaactaataaattcaggctgggcgcggtggctcatgcctgtaatcccagcactttgggaagccgaggcgggtggatcacgaggtcagcagatggagaccatcctggctaacatggtgaaaccccatctctattacaaatacaaaaacaaaattagctgggcatggtggtgggtgcctgtagtcccagctactggggaggctgaggtgggagaatggtgtgaacctgggaggtggagcttgcagtgagctgagatcatgccactgcactccagcctgggcgacagaacgagactacatctaacaacaacaacagaaaaaaacctaataaattcagcaaggttgcagagtacaatatcaatacacaaagatcaattatatttccatatatttgcactgaacaatctgaaaataaaattaagaaaacgtcttttaaaaatcaccaaaagattaaaatatttagaaaaacatttagtaaaagaagtgtaaaattatattctgaaaaccataaaacattgctgaaataaagaagaactaaataaatagaatgacacccaatgctcatgtatcagaagacttaatattattaaattaacaacactctccaattgatctacagatttagtgtaatctttgttaaatgcccaccttacttctttgcagacattgaccatatgatcctaaagtttgtatgaaattcatgggactcaaaaatgtccaagataaccttataaaaaaagagttggaaaactcacccttcccaatttcaaaatttactataatcaagacagcatggtactgggataaagatagacatagagacatattcactgaaatagaattgagaatttacaaataagccctcatatttatagtcaattgatttttgacaacagtgccaagacagttcagtggagaaagtgtagtcgttttaacaaatggtcctgggacaattgtgtttttatatgcaaaagaatgaacttggactcctaccccacctcacatataaacaaattaattcaaattaaacaaaatattgaatataaaagctaaaattataaaatcttgagaagaaaatgtagatgcaaatcttcatgtcctcggattagccagtggctttttagatatgacaccaaacgcctaagaaacagaagataaaatgtgtaagttggacttcattagaattaatatttcaaagcacaccaacaagaaagtgaaataaacaacccaaagaattagttgcaaagtatataataaatctgtaataatgaagaaaatatttgcacagcatatatctgataagaagcttgtctagtatatatgaagaacttgaagtgaataatcaaaagacaaataactcaattttaaaatgcgcaaataatctgaatagatatttctctaaggaagatataaaattaccagcaagcacataaaaagatttttgacattagtcatcagggaaatgcaaatcaaaactactgtgcaagcccacttcccaaccagtgggatgactgcaactcaaaaaaaaaaaaaaaaaaaaaacagacaaaaacaaaatttggtgaggatgtggagaaattggagtcttctcataggctgcctgtgagaatgtaaaatgtgcaccgactttggaaaatggcttagtgtttctcaaaatattaaagatggaattaccatataacccagaagtttcactcctctgtatgtatcatatatcctcataaaatcttattggtgaatgtcaatgccacattgtttgtaatagtcagaatgtccatcaactgctgaatgaatagataaaatgtagtataatcacacaatggaatattattttacattaaaaagaaagaaattactggtacctgctacaaaatgtgctcaagtctcagaaattagagtagggaaaggaagacggacgaagaatagagaaagcttgttttgttttgtttccaagtgcaaaaatctgttttaaaaatatatggaaggaaagacatgctttaaaatgttaacttttttggttttaaaaacatttttccttttatataaacttttttctctttccaaatctgctttatttataacttttatagtcagaaaaaaaggagaattttcattcaacctgatatatagccagagagaattacacataagaataggaatgtaaataagaatgatagaactgttttctgactttaaacccccacattgtttatctttaaatcacattcatatattatcttaatttttattattttctcatgctccaagtatagagacaaagtttatggagtatcgttacatgtggagatattgtgtcaagtctaccttacctaaataatgttataaaagatttcaaaaaatgtttccagacattgtcaataggataacagaacacacacttaaaaagttgtcaacagtgtcagaattataaactgcaaaattgaattcaaggacatttaaaaaattcatgcaatttcaatccttaataatattagggagcacacaaggaaattaggcagtagttcaagtctcattttgttataataacttaggaatgaagccagccccaaatggcctgagtgactgtgtcgtgcgctctatgttctggaagggaactttccctttggcacttgtcatttgaaactcaatccaatctcataagatatggcatgtttgccttattcttccataagaaatgttgtaattcttccttatgtgaatgccaaaatcttgagaggggcataaagtaatgctctgagtcactgaatcctaaaaatactgatgccacagtcaagacagagagaacatctaaagcacagtactaatattaataggagagaggaaaatgaagagtaataatgattattgaggaataactaacatggaatccttggatcccttgggttactatatgagtgtatattttatgtctgtataaattgagtaggatacaatttatgtctgtgtcatacaactgtaagtctgtgtatttttccttttttttttcttttgtctgtatttttgagggtgagagctttcagtactttcatcagatccaaaagggatacatgaaccaaaaaagatgataattatttcaccatggaaaagaagtctatcttatgaacaggctgggttattagttcaggtacatattatgtgagtttttcaggataccactgcacttccttcttgtttgcttgaacttaatgcatgaattacttgacatgcatcctgagttggaggttaactgtccttttccatttcctcatctagtgtgacttaagttcagatcaatcaaatagagtcccaggcctagatgatgcctcttctgtactttgacatatctggagaagggtctgtgaatccacacctaaagtgcatacatctagagatctcagtctgatcctgacccaaggtgggagtgagccgcttgtctccatcctttccctccactgaccccactcctccacatattttctggtagccccagagtccctgctatagccacctccacaggtgatggtgataaggtagggagaccggtgaaagtccctaacataagtccctagcatatggcctgactcatgtagaatgcattcaagaaatattgtctgagtgctttcttgcttgggacttttttcatccctgctaccttctctcccgtttactttgcttgttattgggttgagctgaggaagccatgggggttcagccactgtagtcaagatggtggtcatcagctagggtagtcctcaaacttttaatgcacatgtgactatcctaggtatctttttaaaagacagattctcattcaggaagtttggggttggggctcagattttacatgtgtaaaagttcccagatgatacaattgccgcctgtctgtgaaccactttttgataaccaaggagttagaacactgtatatcaaagatatgtagaccaaagaagctgaatgtagatgggggtaggggagttgtgagtgtgtactcacgagcacatgtatactcttggtcagttgtgggtttactttgctccatcctctgaatcccatcttaaaagcaaggattttccaagtcatccaaattaagttaggcttgaattgtgccctgggctctacctttaaaattagagtatatcacctaatagccatttttaaaaggaaataaaaacaacaaataagggaattaaaaagttgtgtgaaaaccaaaaatatagttgtaattatataaaaagagagaatagcagattgtaatgctcaataaagcatcaataggttactgtaatagcaacagaacagaaataaatgattaagagatatttaaaaatagattaataagaaaggaaactgaggttgaaatgaattagacgaaatggaaaggcatcagtgaaagaagcatttctaggtctgacctatggaagatggaataataaggaacagagaccctactcatgaaaattgattgttctggtgaagtgataattttcaaaacaatacatttaaaatttgaacagaatatactttctctgcataatgtaccatttttctgcagttcattaatggtttctcttctgttcagaattaggtatttgtcattaattaccataacatgtccaaaagtcatcaggtgaacttccctgaagtatattcttatattttgtatgactcaaatattaaagtgtacaaatagaaaaaataagtattgcataagtttccttagcttatgagaaacctgaccatgaatagtatgatccatggatattggatgtatacattgaggtggtgaaggatgtgaaaagaggagagttttcccagagcttcaatagagacagaaaggtcttggcacaagccacgtggtctctccttcagagaattagggaagtttagtagtaatatttctcatagagctggtaaattgagtaatatctcattattctgagattgtagaggatgagattcacaaagacaggaacaaaggtcctggggtataaatgggaaaagaagggaaaaattaatcttagctggataggaaggttagtattgagggagttatccaagaatcaaggttgtgacaaactgcctgaaagtaaaaatagatggagttgtaactgagatgaggtcttagcctccagtttatgttgagttccacatgtttgaatacatctgacatctttttgggaacaagctcatcacaagggcccaggtatacaaaattggccaaataccaatacctcaggcatttaaggctagattcaatagccctaaatagccataatagcactagcagaagcattaggtagtgtctggatattggaagaactgatttaactagtaagtgcaagataatgtgatacaaggcccattgccttgctaccaatagcaatgtagttagaataggctaaacagatgtaacaaacccccaaatatctagtggccaaaacaatatacaggctcatttgttgctcatataacctctccaagacagctgttcctacctccttgttggatcttctctttgtgacaattcagggacacatgctccttccattgcctggatatgcctttaactagggaaggaaaagacaatgtggaaaacaacttccacttttaaaatgctttggtccaaaagaggtgtgtgtcgcttctgctatcattgccattgatgatagctagtcacattgctaactagttatatagaaggctgaagacatgtagtctctagctgggtaaccactttgcagctacatttgtgtactattgaagactagggagaatgagtcttgatggggagcatgtcatctctgcttaatactcatgcaacagaaggtagcccaagagcgaaaggggcattctcttcttttctacacacagaacaggataacttctgtttaatgaggacctctgagaatagagtaccccatgagcatctcaggggtgccaagccattaatattggtgggactacctgcttggaggtggaccctgtaatattggtagatgcacctgtgaaagcacatatcatagcagcatgtatcagcaagagagaattggacataggaggagaaacagcttgtgtgcaaggttaaaagatttgttcatgagcacatgtgagagagaagccccaggaacaaggaaatgagaaaacaattactgcctcctacatgttcccagaggagggggctgggagagcaattaagcataaagagcattaattgcatagaagatgctgagggatcatagatttgaaagcaatttcaaaatatgagtattttaagacttttagcaagaacagacaccataggctgtatatagtttcctggagttatgattaaaggatgaaaacaacttttgtttagatatgtaggtaggtaagtaggtagatatagatagatatgagaatagtaagtttgtttaaacaaattattcattacatcatagtgacccttagtgctttttgatgatactgactgatatggtttggctgtgtccctacccaaatctcatctaatagctcccataattcccacgtgttgtgggagcaacctggtgggagatgattgaatcatgggggcaggtctttcctgtgctgttcttgtgataatgaatgagtctcatgagatctgatggttttaaaaatgggagtttacctgcacaagctttctctgcctgctgccatccatgtaagaggtgacttgctcctccttgccttctgccatgattgtgaggcctccccagccatatggaactgtaagtccaacaaacccccttcttttgtaaattgcccagtctcaggtatgtctttatcaccagcgtgaaaacagacgagtacactggcttattgaggaacagaatataatcagcctccttcattcctcactcactaaaccaatgtgctgatcatttctagaggcaaggacactccaagaatcaagaaagagccgatgatgaggctttctattattctcctggactggacgttgtctcagcttctgctgggccatagaaccctgcctctaccttgacttacccacatgttgttttggtgccaagtattgagtgctgcattttggggtgtacaagacagattggcatattgctaaaaatgtgcgaggacagaaatgacagaaactagtctgtaagattctcataggttccacttgtcttgcactcgtcatgtacaaaaatatgccaagcattgtagttcattaattcagtccttaccaaagctggtaaagcagttattaatttatccactgtaaagttgaggacatccagccttttggaaattaaataactcctccaatatcacacaagtaataaggaggttgtgcagaaattgaaaacttgtgaatttccaaagctcatgcccagctggaggttagagacatagggttcctaccaaaaatgtgttcctagcactcagcatagtgttcagcacttaagaggaaacctacagcagattgctaaactgggtatttacttacactatccaaaagtaggaaggaaacatacccatttgtttgtgaattattgtatcaaatcctattaatttcatcctaaatattaaataaaattcctaaataggaaatagcaatgttcatataaagaagcagcaaattaatttattggaatcgacacattcctcaaatggagatttggttgatattagagacttaatgtacctcccttagtgcttaatgtataacagagattccacttatcttacctatataacctaagaaatttgaatattttataaagttactttttagaaaacctgatttatttgttttccttgtcatctcagatggataccttcctctcaaaatctatttggaatttatattttcaagtattcaattaactaacatattaagcaggcattctcctgtgtaagttcctagcaacttttaccacttgtactaaaataaaacagatagttaagccaaatgagttaacttttctgaaagtgtatctttatacaacattaactatagacatggaaaatacatttattcacgttagaaataaatgcttctgtgagatctttcattttgataaagtcaaaacaccatcttattaataactactatattaattttgcagcaaattacaataagaccacactgtatagttgtgccattcagatgacatttatgaaatgctctaatttaacatggtgacatatattacctgcatcttttacacattatagcttatatcctctgagcgaaatagacctaaaccatccaaaaaaaaagagagagagagagagaataatgcaatgggaaattatacccctttgagaactagaaggactataattacattgcttcctcttaaaaccattcaaatatgtaaccattgctgggaacagcagtatgtggggaacctctttacactctttctgtcttgaacactcaaaagattgagaaaaaaatattcctttcctactatagttttatttgagcatgcttcagaattttacctttttgcacactccttagagattatcgtggggaagtttagaaagcagtttcttggaaatgccttttggaggggaagaggagctataaaaatataccagcctgacaaatgacaggcattgtagactggaaaagaaaagacatcttggttttacaccaatgtagaagcttttctttgcaaatgagtatttttgacagctgagcaagatgataaacagaagtatcacaaaacacttaaatggaaacaagtattatgatgtactttattcacctggcattctccaattcatgacatttatatgtggcagaacccactgcagattcatttatttatttttgaagtggaatgagttccttacgaaggtagcctgttacattaatgtggacttttcttctctagatgcagaagcttaaggaaaaaagttattgtatctgtactataaataagtggtaagtctcagaatccacatcttagggctgagaaggctcctagcaagtacaatatactgtataaatatagacaaataaatatagatatagattttttgtgtaagcaccggcagtgttgcaaatgattagatatttcataaatgccttttctaaaaaggtattgctgaaaccagtctatttctagaacttatattcagatgtttagaggtataaatgcttcaatattggctaagcttagaaaggctatgtttctctgaggctcagtgatagacataccaacaatttgatgagatgcatgactaagaagaaaaagagagtaagactgagtccctgtgaattgattgacttggtgcagtggcagagtaggtagcaagtattaaagcaatagttcttaaatgttagtgttcataagaatcatcaacagaactttttaaaaatgaagattcctaggttttaactttagcgacttttaattctttaggtctggtatatttggttgtgggaaatcaaaagactcaacttcggaatacactgaacagttgctgactatagatttgtatattcaaaattttttggtatttaaaaatggtatgtatggtttattgagtcaaatattttaaaaactatgaatgtgtgctggtttgtttttttttttttttctggattggaggacaatttggggtaagcattctctatttaacaagtcataattaactccctgccaaaactaagtagaaattgtgatttctataactcctatatttgataatatctcctaaaaatatttcagtgatatagcatttaattgcaaataattcatctagtcaccaaacaaatgtagggacgttcctatataccaggcactgtgcatatcaaggtgtatattacagtgaataacagaaacactcacgaagtgttcaattgaatttaaccttgaaatgtattatttattattattatgtttaaataaactatgtgaggtttttttttcattgccaatgagaaacccaccctaacttcagaatttttatctttaagtatatcctattttaaccacccttacccatccactctcaatgatttctcctcagtgtggggccttgccgtggaagtgtgccctggtcagtgagttttgagagtccgtggaagctagattgccctcggctcttcagttcccactgcagaactcttgcagtcactggctattggatcagcagaacctcttctattttcagtcgcccattttcaaattggctcactgaactttaggttctccagttttcaggtctttcaaaagtccgacacccctttactatcatctgctttctcctacacaggggctaatgccatgcaggttttgtgactgctggtggtgtgttcctacctgctttttttgggaggcttctgggcacagctggtcacctagtttcattataatcatttttaatggctttgctgttgttgtgttgctgtttagttctgtcagcttttatcctgggatttagagagacccaagagttctgtggccacataaccattgatcctgattcccctggagtctcttttgacttttactgcctaatttaagctgaacatatgaaatacatgaaaaaactgaaagctcaagctcgtttgttgtttgtcttcctaggttatggtttccatttctccctctttctcaacctattttgccaatcaatgtctatccttccttcactttttgcctactcactacaatattcaattacacaaacataatttttcctctgcccaccccagcaccagcatttttctgggagtttaagtctcttatgaatctgggaagaaaggaactaaaaatgagcagggatgaatagcaaaatgagtgagtcaacgagtagcaggcaggacattagagtgaagctgttttcttacccagaagactgatgatgggaaaggaaaaaagaacaattcaaaattagtagaagaaaagaaataattaataaaacatgagtggatattaatcaaatagaaattggacaaaaaatagtgaaaatgaacaaacgcaatagtttgtcctttgaaaaggttaataaagttgatgagcagaaaacacaaagtaccaacatcaaaaacacaaattaccaacatcagaaatttaaaaaagagacatcaatgtcgttgcacattttataaacattaaaaaattacagttttatgaacagctctgctaataaatctgatgtcctgaatgaaatgaacaaatgaacacaaaaccaacaacaaaaaatagaaatagcctcacatatattaaagacatttaattcatatctaaaaacctttcaacaaggaaaatctcagtcccaaatggcttcactaatgaatttgccactaacataaaggaataaataatattagtcctacacaaactctttcagaaaaccaaggaagggcatatatttctcagctcattttgtgagggctacctaactttaatcccataacctaacaaagcactaaaagaaaagcccattagaatattccatatgaacatagatgtaaaataccttaacagcatattagcaaatggaatcctgcaatatataatagggtaatgcatcatagctgattggatttctcccaggaatgcaaagttagtttaacatctgaaaatcagttaatgtagtaagccacataaatagaatacaaaagaattcccaggtaatcatctcaatagatcaaaaaactttgaaaaagaattcaaaacactttcatgataaataccctctgcctactaggaatacaagagaacttcctcaaactgaaaagggcatctgcaaaaaccctatagctaatattatgttaacaataaatgttaaattttttaccactacatcaggaacaaagcaaggaggtttgctcttataacttctactaaaaattgtaacagaagtctaaagtaggacaaaatgaaaaaacaaaaagccatgaatatcaagaaagaagtaagactattattatttgcagaaaatatgccactgtatagacagtgggagtataaaaattgcttggcaagcatcaagtcccccacatacaatcccctcctcacactactctccttcgtaaagccatgaaaaaccgctttatattctaagtaaggacgggatgtttgatgtgcaaatgcagctgtaagataaatccctgagcaacatttttggccaccctgcccttcctatagaaagtctggggctgtcactgaggtagggttagtaatggtatgtgagactggagagatatgtggaaaccacctcatggtatttggtcttcactagttaggcaatagggagctattgaatatttctgagcacaggagtgacacagaggtgtaccaagtaggtaagaggcagtggaaacaatctacctcagtggggaagagtattgtatcacaaaatttgtttagaattgctagtacttggtgataattaaaagcaaaacaattttaactgaatcttattattttaattttacttacagaaagtgcatcctcttttgtgtacccaggtgtttcattctcaccaccttaccgtaggattattatcatcagaattaaagtagatgaggcaaggcacagtggctcatgcctgtaatcctagcactttgggaggctgaggcgagaggactgcttaaggccaagagtttgagtttatggtaagctatgttcgtgccactgcactccagcctaggcagcagagtgagaccctgtctcttaaaaaaaaaaaaaaattggaatgaatgaaaattaattgatagcagtttattaaatggattagggagaggaacagactggtagatatcattcagtatacaatagctggttagtgatggcaattctgaaagaagaagtggtagaaactgggaggtgttgctagtgtagtatgacctttcaaaactcacagagtgcatagcttgtggatgtatagaacaatgtgaaagaataaattctccagaaaggaagaagaggagttagagattttataaaagagaagtctatgatgttctctaggaaagaaaagaattttctgaagaatatatgcattgattaaatgatttccttttgccctcatttatatttattttctgttcaaatgaaacacttaaactaacactcaatttccgggacagatttcctgttcttacattcttcaatttgctttttaaatttttactttgtttagcaatatcaacattgcctcattggcttttagtgagtttcttgagaagatgtaatctatagaacattagttcttctctcccaccagacagatgagtgcatagaaagacatatagttatactgctgctgttttaaaagtgttgcttcaaattacctaaaatatagtgactattagataatcactgataaaaactgtgttcatctaatttattcatcttgaaatcatgcttcatatttcctttaagcacaaaatagttatgttcacacatgcacaataaatcatatatggattacttgatgccttgaattcaccctcatagaattttatctcctaatgtaaagaaaactgactggggtaattattgcaggatcttactcttttctgttgtcagtaaccttcccaccaaactcattgtgacaattgtcacccggttgactgtgcatatccaccattgctccagagcctaggccagcagacttttgctgcatggtccaaaatggtgaggtcctgggtgtgatcacaaggcaatatgcagcaaacattagtgaccatcagtgctaacaaagaaacttacaaagtaacaacttgaccacttggccaattcttccactgtgttttcagctcttcacaggtgtaggccatgccttaaacttaattgagtctagcactcttcctgttactattattatatttgtagcttatgataagcagagtgaatttaacataggggttatgatcatgcatttgagagttgggccacttagtaactgtattagtccgttttcacactgctgataaagacatacctgagactgggtaatttatacaggaaaaatttatacaggacttacagttccacatggctggggaggcctcacgatcatggcagaaggcaaagaggagtaagtcacatcttgtatgggtggcagcaagcaaagagagagcttgtgcaggggaactcttgtttttaaaaccatcagatctcgtgagatttattcactatcatgagaacagcacaagaaagacctgctcccatgattcaattatttcccactgggtctccccccacaacacataggaattcaagatgagatttgggtgaggacacagccaaaccctattggtaactgcaccacctttaataagtaatttgatctttctaaggtttaaattcttcttctgtcaaatgaagattcatgtattttcacaaataataaaatgacgaaaattcctgccactatggagcttacattgtaaagtgatttggggagttggaagagaaagaacaatcaataaatataaaaataagtaagtttatttactaagttaaatgctataggagaaaactagacaaagtaaaatgccttgagagtaccatattaaggaaaggaattgcagttttggaaatgtagccaagagacttttaattgaaaagatggcatttcacttgagacctgaaggagatgaaggagttagtcatgtggaaatctggaagaagagacctaggcagaggcagcagcctatgcaaacaccataaggtggaagcacccctgatgtattcagaaaaggggctgtatagctgaagtgagcagaagaaagagtaggaatgtcccaagcctacgggatccttgtgcaagctgcaaataattggtcctttcactttgcaagtactgccccacatccatcaaatactttagaaggtttgaaaaaagtttgactatcaatcacttgatgaattttcctgcccactatttgctctataccagtgtgaaatgtacagagtaatacttccacttcatctttaccgagcacttactatgttccagagatgatgctaaacatgtttacattaataatctcagttaatcctgacaacagacctatgaggtagatattattatgctcattttattgataaatacgtgaagacttcagtagatttaagttgttcagagtatagttaattctgtggctagtaattgtggcacataatcctaatgttccaggaatttatatcatttagttgaggagacactcctcaactcctgtctcaggtgacaggagtaagtgaaattctaaggcacaatatagcatggtgcataagcaggcaggactgcagccacagaaccctcaattttaattcaggctaagtcacttactttcccttttatgttagagacgtctgttagtttttctacaggaagtataatacctcacagggtaatttattcacaaatacgaaaacatgtataaaacatcatagcagtctgcctgcaatatcgtaagtgttcaaaagggttgtggatattattattgttgttgtaagctaaggaacgctagaaaaacatcaaagattcaattactcaaaataacttttgctgagcatctactacatgtaaaatatgtatactgtgggatcaatggatgatgtaaaggtgcaaaaggttctggcccttggggagtgtatggtacactgggaagttatattttcagacaagacataataattctaatacaagctagaccttaaggaattgaatgacagaggtaacaagaaaatgctgtaaaatggctgaggagagaaaaatcctctaatttgggaggagctcagtattgacaaaggctagaaatgggtagagaacactttcccaaaagagatgtcgtggtgcctggtgagacaggctgtgaacttgacttctcccatccgttccattattaatgtgtgtctctgtgctctagcattcatttcatcttgtggacatgctattgtttccatttaaaaactctcttgatcacaatttcttctgtggcgatggtctcatgtcctgctctcctttttggcaaaactccttaaaagacttgtctaggctcatgcctccaaatcctattctgctattatttcctggaaatatatctgtcaggccttcactctcatcattactttgcaacttttcttgttaaggtctccaaggacctctgtctttttaaacaaagctaaattctgtcttcattgtatttgacatacaagcaggatttgacacagttgatcactctcttttcatttagaggactccacattctccgggttttcctcccatatccctgactatttcttctgtatcctttttctgtgccctcctcttacctttgaacacttattgttggagtgctctggaactctctttagaggactttcctgtatctacgctcacgcccttggtgatattttacttcaaataccaattatacacagacaatactcaaatgaatttcacaatcatatttccaattaaacacttaacatgttttatatatatatataaaatattatttgaatttaattatctttatcttcacatcaatacataataatctatcagcaaatcatgttggttctattttcaaaaatatccatagtctttcattcttcctagattcaataattcctttgcttgtctatttagttttctatatgtcattaatcttcctcatgctgacgtctttgctacatgaatatatacatatatatggtacacatacatatatattttatgcacacacacatacatatttatgctcaaggacctcctgccctgctatcagcctagagcttttcatatacctctacatcctcatttcctgaatcccatgccttccattcttgttgctgttgtctgtttactttctttttgctggaactatattactcaatagcttcctgatataggaagttaaagttttgaatccttgcaaatccagaaaatgtttgtattctttctttacaggcaaccgataatataacttagcatagaattctggattagaaataactttactcataatttggaaggtaccattcttagctttttagtttactataatgttgcagaatactgcagtgatattctgtattttctatgtgacttattttattggtctctggaaatttttgtttcctttttatttttggaatttgaatgcttcatgagattgcaccttgatctgggtttttccaccagcatgtggtgagccttttttttaactttttaatattttatttttaatcaatcaacacataatatttatacctattatgggatacagagagatatttcaatacatatgtaaaatgtgtgagtatcaaatcagtgtaattagcaaatccattaccaccaacctgtatcatttctttgtgttgggaacattcaaaatcctttcttctagctatttgaaaacatataataaattgttgttaactatagtcaccatacagtactataaaacacaggaatttattcttcttacctatctgtgattttgtatctgttaaccagcctctccctatccccttctccctgctatccttccaagactccagtaaccactattcgaccttctactttcatgagatcaactggtttagcttccacatatgagtcagaacaggtaatatttatctttctgtgccaggcttatttcacttaacataatgtcttccgggctaaacataatgccctctaggctaatccatgttgcttcaaaagacagagttttattccttttcatggctgaatagtatttcattatatatttatatatgtgatatatgatatatatatatatatcaaattttctttatctattcctttgctaatgagcacttaggttgattctatatcttagctattgtaaatagtactgcaataaacatgggagtgcagatatctcttcaacgtactgatttcaaaacgtctggatatatgtacccagtagtgggattgctgaatcatatggtagttctctttttagtttttttaagtgaccttcatacttttttccataatggtatgctaatttacattcctaccaacagtgtataagaattcccttttctctgcatccttgtaagcatttgttattttttgtcatttttataacatattttaactgggaaaagataatattgtggcttttgtttgcatttgtctgatgattagcaatgttgagcattttttcgtgtacttgttggctatttgtatgtcttcttttgagaaatgtctgtccagaccatttgcacctgttttaattggattatttggggccattgagttgattttcttatatattctaggtattaaacatttcttggatgaataccttgcaagtatttttccattctgtaggtcgtctctccactttgttggtagtttcttttgctgcgaaagggcattttagtttgatgtaattccatttgcccagaccaatgtcctgaagcacgtctcctaggtttacttctagtattttcatagttttgggtcttacgttgaagagtttagtccattttgagtggatttttgtatatggtgagagacgggggtctattttcattcatttgcacatggatagccagtttccccagcaccatttattgaagaggatgtccttttcccactctttgtttttggtgactttgttgaaaacccgttggcagtaaataggtggatttatttctgggttctctattctgttccattggtttctgtgtctgttttacgacagtatcatgctgtatagctttgtagtaaattttgcagttaagtagtatgatatcctcagtcttgctctttttgaacaggtgactttgtctcaagattgatttgtctagctcagtggggtggctcacgcctgtaatcccagcactttgggaggctgagttggacagatcacttgaagtcaggagttcgagaccagcctgaccaacatggcgaaagactgtctctactaaaaattcaaaaattagcagagcatggtggcgggcacctgtaatctcagctactcaggaggctgaggcaggagaactacttgaacccaggaggtggaggttgcagtgagccaagactgtgccattgcactccagcctgggtgacagagagagaccccacctcaaaaaaaaaaaaattgctttgtctattctgggtctttatggttccatgggaatttaaagaattttttcttctatttctgtgaagaatatcattagtattttgataggaatcatattgaatctgtagattgcttttgataatacagtcatttttataatattagttcctctaatccatgatcatgggatgcctttccattttcttatgtgtcctctttaatttctattataagttttatagttttccttgtacagaacttttaccctttggttacatttattcctcagtatttttgtttttttagctatcgtaagtgagatttcatttttacctagtttgtgcttgttgtataggaatgctactaatttttatatattgatttgatatcctgcaactttattcgtttagtttatcacttctaagagttttttggtggagtgcttagtttttattacatataagatcctgtcatctgtaaaccagaactagttgacttcctcctctccaatttgtattcctgttatttctgtctcttgcctaattgctctggctaggaatttctagttctaggttgaataaagagtagtgaaagtgggcatcaccatcatgttccagttcctagaagaaaagttttcaccttttctccgtttaataagatgttggttgtaggtttgtcatatatggcctttattattgaggtacatttcttccatactaatttgctgacagtttttagcataaagggatgttgaatttcatcaaatgctgtttctgtcttttgagatggtcatatggtttgtccttcattctgttgatatacttttatttatcccatttattcaatttgctcatattgaatcattcctacatccttggtataaatcacacttgatcctggtatgtaatatttttgatgtgctgttggattcggtctgccagtattttattgatgatctttgcaactatggtcatcaggaatattggcctgtagtttttgctgttgcatatttggttttgctatcagggtaatgctggccttataaaattagtttagaagaatttcctctccttcaattttttggaatagtttaagaaaaaatggtattagttcttctattaaagtttggtagatttcagcagtgaagccattgatcctggacttttctttgttgggagactcttaattactgaatcaatctcattacttgtgagtgttctgttcagtgttctattcctccttggttcaattttggccagttgtatgtatccacaaatttatccatttcttctaggtttttcaatttgttggcatatagttattcataatagtctccaatgatcaactgtatttttgtggtttcagttgtagtgtctcctttttcatttctgattttatttgagtcttttttctttttttctcagtctagctaatggtttgtcaatattatctttcaaaatatcaactttttgttttgttgagcttttgtattgtttttggtctcaattttatatccttcttctctgatcttttttatttctatattgtgccttgcagaggacctttctagttaaatacatttgggaacttttgagcttcctggatctgggtatctatgtctgtcccaagacttaggaagttttaagttagtatttcattaataagtttttattaccctttttgtcatcttgtctttctaagctcccacagtatgaatagctgtttgcttaatggtgtcccacaagtcctgtaggctttctttattctttcttattctgttttctttttctttctgtctgcttgagttatttcaatagacctgtctttgagttcataaatcatttttttctgcttgatctagcctgttgtcaaaactcttgattgtatttttatttcattaactaaattgctcagctccaatatttctgtttggttcatttttatgataccaatttcttgttgaatttctgatttagatcatgaattcttttcctgatttttttcagttgcatatctgtattttcttctatcttgctgagtttccttaacatcattattttgaactccttttctggcattttgaaaatctcttttactttggggtctgttactagaggattattgtgttcctttggtagtgtcatgttttcttgctttttcatgtttcttgtgttcctacattgatacctgcacatctggtaaagtaattgcttcttttaatgttatggactagcgcttatagggaaagatttactcctgtagataagttctagagtgttaagtagagggtgataacttgggtcctgagtgggcacagtagtgtagtctctgtgaagtttcttcaactgtaatccatgtcagtaatgtttgtgaatgcttcactgacctaacctgtgggagtttgtggcagcagtgacatgactttactggaatcaggcttattgagtgagttatcaggatggaggcatgtttgtgcatgtgatgggtcacctagcttaggaactggcttgctttgggtgaagccgtgggctgtttctcaggccgggggcatgagtgttcagtggatcagctggttctggaactggttcaccaggagtgaggctgttgggtcgtttctcagtttaggggcataggcacatgttggtttgccagccattaagccttttaaaactatggtttcatgtctggaaaatgtgtattttatactaattctttattaacttattcctttaattttttttccttttggtgtatttctgaaaatttgttttcatctcattattattgttagcctttctgatgtattttcttatctttctcttctaatcttttagttgagatttttttccagcctttttttttttttttggatatagaatcttagtatattgtctaggctggactcaaactcctgggctctaacaatacttctacctaagcctcctgagtagctgggactacaagcacatgccactatgcctggctgtatatttttaatatttaagaattctttctttcaccaattgtttattcttttaggcttttttttgtttctatattttttaatgaatgcaacttttatcttctggggataacagagatattttattaaattgttattagttgatgatttcttccatctctaattccctgcattgtttgtttcctcatctggattatcatttttcatcctcctcctttatttttgtttctgtcattcacattgtatattttgcacatttgatgaattttgccatctgctttattctgtagagaaatggtaaaacatttccaaaatggcctttactcatgtttatgagcagcaatacagctttactttgcagaggttaaaagctcaaatattagttctagagttcttatctttgtagtatttttctgccagtttcctctttatggaaaataactctggctcccggctttctttaaactgtgtagaaggggagttgtggtggtaaaggggagaggcagtgtatacagactttcacttaatcctttcatgtctaccttgtgcctcttccaataacaagttgttgatgttccaatataatggagctggttaatttcaattattcttgacaataagactgatgtcactgtggagtaggattagtttggctggctgagtggggttgaaaaggggacctgaaaatctaaatactttctatgtggaatacctctaattcatgattctcaaccttggcactatggctattctgggctgggtaatttgttgtgagggatggatatgtgcattgcaggatgtttagcagaatccctggctacatatcagtatactacatgccagtagaactcctcccctcactgggacaaccagaaagttcctctggggacaaaatcttccttagctgagaaccattgtttaactttagacctgtgtgtgtcctcttacttctctcaatgtttcattatcttcaagtcttaaggctctcaaagattctataggaaaaatcagttttcatgttttaggaatccaattcagctagcactcaagctgtaacttctctgattattcaagaatgttgtcaatatttatttctatttcttaatttcattttctgtcttcaaaatttttgtaaaatgtatttcttccctattgatttctctgctggcctcattaaaattatgggttatattttttaaaattcctatttttttaattgaagtatcaagaaaaagaggaaaaggcacatgcttgatctgaactttatcaaaaattggtaattgttttcatctcttactattaactcttttttaaatcgatcctcttgctttaggaatccaaatcagcctgcactcgtactgcagtttctctgattagtcaagaacgttgccaatatttatttatatttcttcatttcatttttcgtctttgaaatttttgaaaaatatatttctccattattgttttctctgctggtctcattaaaattatgggttttacttgttaaaattgctgttattttaaagtagtgagaaaaagaggaaaatacatgtgcttaatctaaattttaccaaaaattttatattttagtaaatgtattcagatgcatatttttctgacaatgggcagtcttagttaacacctgtatcctttttcttgagcaagaaaataaatttattataatttttacttattctgccctagtattcctcatggataaatcgtgtcttaattttattaatctttgaatgcatcaattctaataagttggatcctttgtcagaaagcagaatgtgtacaatatacttatcccttagttttgtcttcctgggaactggctcttgatcacaataggatatatacctacagatcagcttcattataatttaatttactgtatttggcagcaacatcttctagtggtaacctagaccgagatgaaatattccatttcaattgacagttataaagctacagaccatagatttcagttatttgagtagttactacattaaaacacatctttttttcccttcctttgctcccaaccacatgtgcagcaaccagtatgtttctaaattttgctcctgtttataatgctatttcttaagcttctaaacatcgcagtgtgcatttcacctctgctaatctccatccaaattctgctatgttttggagtttgtaagaaagtgtagtgctgatgaggggattgaagtttcaggattccaattttggctgcttaacaggaacagttgaaggatggcatgaggtttttgatccatggttttccatttccctggtatagtaagcataggtatcactgccaaacttctttggagctctatgttatttgggttgagagcttggagctatgttaaacagctgaataaatgtttcccaatgcagctctgtctatgatgcagctcctgaaaattctctctgaatgttgtcaactagttttctcttaaattgagtttatagttgttttgtcaggtccaaatgtctttttgagactttactttgactgaacattgtgatagaatttatcctcctgcttgaaatgataaaaatatggacaaaatgtattaaataattgtttgctagatgttggacatcaggcaatgaggacaatgtttgctgagaaataggaaataaattatgtgaatcttacaattgacccggattactgcttacagagtatttctagaccacgacttagggagagaaatcccagatggagctcagagagttctccaaattgaagagatatagccaagtgtttcaggaattcaaagtagttagagtttgcagagagcagatagaggaacacagagataatttcacagatctacagagcatcttccttaagaattcactttactacggttcactgcatgtatgaggctgcagaaagcacaactttcaattattaaaagtaacaataattaacactcatgtaatgctgggtatgtgcctatttccactagctgaactggcgagaaaatttatgattcgtgggatatttgataagagtacacaaaagggtctagcctcaacagtggagaatagccctaggctgataactacttcaataccacctaataaatcttaagagcaagactcaaaaggaactgtttccaagtaatttaactgcatccaagaacaaaacacaaatatatttgtaagaacactgaaatatgtagtacctaacaagaaaaaattcacagtctctggcaccaaatcaaagattatcaggcatgtaaagaagcaggaaagtacaacttataatgaggatgtaaatgcatcaatcaaaattgatccagaattgtgagaaatgttagaattatcaggccagtatgttgaaacagatattacaactctacatagtttaaaagctacataaaaatatggaaggtactaaataaccccacagatcaaaattccagagaaaaacctacactgtatggaatgaaaatacactggatataattgattatacattaaacataaaacatttatgttatatataaaaaattagtgaacttgaagtcatagcaatataacctatccaaaatgaaacagagttgaaagagcatttgtaaaaatgaaaacagcatttgtgagctgtgggacaacttttagaggcttggtatatgtgtaattggagtccctaaaggaatggtggggtggaggtgggaatataaaaaatattcaaataatttatggctgaaaaattccaagtacagtacactgaaaaccataaagccacaaacccatgaatctcaagaaaactaaaaaataagtaacatgaaggaaatcacaaaaggcatattataattgaattgctcaaagctagtgataaatttttaatgataaaataaaatactacagcagccagaggaaaaagacgtgttaaatacaaaggcaaaacagtaagaatgacaacagatttcctatccaaaataatgcaaagaagaagacagtggggcaacattcttataactatgaaagaaaataaatagtgcacttatgattctatatctagtaaagatatctaagatgaaggtgaaataaaaactatttgcaatacatataatgaaagagttcatcacacagaaacctatactataagacacattaaaaagaagtccttcagtaggaaataaaatggtatcatatggaaatatggatctgcacaaagaaacaaagagcacccaaaatggcaactgcattggtaaatacggagggtatttttctaatgatttaattttctttaaatatagttgacagtttaaaaaataataataatatagtaaaagttttataacatgtgtaagtaaaatgtttggcagtaataacacaataattaagagggggaaaaggaagtacccttgacccttgaacgacatgggagttaggggcactgattccctgcacagtcaaaaattcaagtttaattttgactctccaaaagcttaactactaatggcctaccattgaccaaaaaccttactgataacatgaacagtcaattaacatttattttgtatatattatttactgtattcttaccataaagtaatctagagaaaagagaatctttaggacaatcataagaaagagaaaatgtatttactatttgttaagtgaaagtggatcataaagatctttgtcctctttatcttcactttgagtaagatgaggaggaggaataagaggaagaggagagattggtcttgtggcctcatggctggcagaggtggaagaagattcttttataagtagactcatgcagtgataacccatgttgttcaagggacaattgtataccgttgtaagatccttatactctatttgaagtagtctgtcacttaaagctaggctgtgataaagatgtaggataaaaaccactaaaatcataaaacaaagagttataactaataaaccaacatggagataatttgaatcataaagaaatataaaataacacaaaacaggcaaaaaaaaaaaaaaggaaaaaagaaatcccaagcagatgggacaaataggaaatatcaagataatagatttaaacataatcatatcaataataatgctaaatttacatattctaaatactccacttaaaatatacagattggaagattggttaaaaaaggaaaaagtacaacttaactatatgctgcttacagaaaagatatttaagtataagacacaactaggttaaaagtaaatgttggaaaagataaatcttgtgaacactaatcataagaaatctagggtgactttattaatatgagaaaacatgaatttttagaaattttgtccaagataaaatattgcccaggatgaagaaagtaatttcattttgcaaaaggagtcattttgtcaataggacataacaattcttaatatttctgtaccaacagcagagcttcaaaatgcacagagcaaaaactaacgtaactgaaggagaaagtaaaatccacatttgtcggcaaaaatttcaatacccttctctcaataattaatagaacaaactgacaggaaataagtaaatctatagattagaacaacactgtcaaccaacttgacccaatggccagttatggaacattcaacccaacagagcagcaaactacacctacttttcaggcctacacaaaacatctaccaaaataaatcaaattctgaaccataacacaagcctcaatagatttaaaagaattcaaatcatataaagtacattatggggctgcagttaaattaaattagaaatcaataacaaaataacctggaattactctaaatatttggaaactaactaacaaaattctaaataatccaagattagaagaggaaacccaaagaggaattaagaagtattttgaactgaatgaaaatgaaaacacagcataacaaaattgtgagatacccaatatggcaggacttagtagtatattaatagcactaaatgcctatgctaggaaaggatgaagatttcaaagaaatatcttctactttacaaaactagcaaaagaagggaagacccaagccaggctaatgaaagctatttctgagtttctaactgcatctcatggggatgatcatttcttttctctgctcttgtggctgaaagcatgttaaggccaaaattgtgattcaggcaagacccaaatttataagaccaagattgcattttaagccataaagagcaggagaatctccatggcttgaactgtgaatagatatttgtttgttatcagagatagtaattgtactgctttatctgtatttccttccatgttagtaaaagaaagctcagaagtagttgatcacatgatcatagagaataaactacatttctcagtctccttggcagctaggtgtagaaatgtggtttaagttctggtcaatgatattttatctattaacgtttgctgtttaagttagtggctaaaaacaataaaaattgcgtatttatttaggattctatggtttggctcagtgctggtgtgcactggcttgtccaacctcttctgggctctctcatttgtctgtgattagctagctggtcaagcagcagttagataggaagacctcactctcatatgtggtggttggcaagctggctgttcactgggacagtaggagcaattattagctggggcacctcagttctctgccatccaacctctaatattccagcaggatagcatgagcttgctcacaaggtgatctcagagttccaagcccagcaagaaagaatgaactctaaatttgcaggcattttaaattgtctgtttgaatcatatttgcaagcattatatgtgctagtatttggccgaagaaaaccaataggtcaatctagagttattgtggaaggatcgtaccaaagagtgtcttagtgtatttttaaaggaaaggggaatgcctttctctctttctacttcttggtggacagcaattggttttagagtatgagtagatttgtattttctcacattaaaaaggtagaatctacaactgtggaatctatagaagtaaactgggtattttcagttgaatcttgggaaactgactaaagttaacatttttaaaaataataatgctttattttatttttaaactacattttaagatatagttaatatacagaaattataatctatatgtgttacagagagattaatgaaatgggagtaaacttgttattttattaatttgtggcagagttcatatagaaagaattgtttttattgacaaaaatatctcgataagacttaggttttggcaagaatcaaggcaatattatacacttttgagatgtctgtgaaaaagtgaccatgtaaagtcaggtgtatagaaaaaagtgaatatgctttatagcagagcaaggaggaagaagagagaagccacagaagatggtagataattggagtgcaagatggtaggtaattggagtgccaatgaaaatctctagctatagggaaactaaagggatattatgaattgcaaagtaatgatttaattcctcttttaccccgaatctttaataaggtttaacgactacaatttgtttgtttgttttgaacaagacttcttgaaattgaggcattagctgagtttcacctctgggtgacatagggcagtgctggcagaagccagaaagacttcaaaatggaagaagcagaagtgtagggtcagggcgactacgaaatgatcaatacgcatagaattcttataaacttaaggaggacttctgtcattcagggatggaattagggtcataggctgccttatctagatttcaaaaggcaaggacgctccagatgatacatgcattacatgtaaataagaatacaacaaggccaggtgcagtggctcaggtctgtaatcccagcaatttgggaggccgaggcggacagatcacctgaggtcaggagttcaggaccagcctgaccaacatggtgaaactgtgtctctactaaaaagataaaaaattagccgtgcctggtggcccagctactggggaggctgaaacaagagagtcacttgaacctgggaggcggaggttgcagtgagccgagatcgcaccattgtactccaaatttgcaggcatttttaaatgtctgtttcaatcatttttcaagagttaaactccatctcaaaaaaaaaaaaaagaaaaaataacaaaacatataaaagataaaggttttgcacttttatttctctttaccttttgcacacttccttgctctttgaaaaagtattgtttacatgtaatgtttaagattattctttgacggaaacatcacatatgtccaatgccttaaggtgtttactatctctttggagaacaggactgatcctgtaaagtaccagcaaagactcaggcctgagttatgggttgatgtacttgaagtgttacaagtatgtacccacacgcctattggattttcatggtatgcctatatgttacacatatccaccaataaatgccatctatttttgtaggctgaatcaaatctctgtcttgagtaatgattttgtatcctttggactagatctgaataagactgagaaacagccaggcacaagaaggcaattcattgttctcactcatctttctaaacctatatgcatctttgatattgaggttcattattagctacaactacatttggtttgcatataaccatttatttttcagtcttagatattttcatatcaattgtcttaattatccttaaataaagcttccagtgagtctctatttcttggatgaggacaattgaggcagtgatagttctttaaaaattatttaatttctaagtccttcactatatcttgtaactgaatcccaacctagatatttttaaatatccttgaaattaaatataaatcaaataatatctttccacatgtaggttacttccctctatggtaactctgcctccaaatgtgaagagctggattcaatccaagtgaaagaaaatcagtggggaaaatgtcagggactataaaagagatttgaagtctgtacccacattgctgtgttagagtcctgagttattaaatttctcatatttatttgacattttatatacatatgtccacttatgaagagtttagttcttatctttctttaatcaacacagtattaactatgcatgtagtagatgaacactgtattttatgtatttgcattcttttcaaaccagatgcttaaagaataaaatgacacagtgttttagctgttattttgctttaaaatgctttaaaacaagaaacatttttggaatttcttatcacaatataaatcagctaagtatatttaatgtggtgaaatgaatcataaataggctgaaatagtcctaaaaggggagttgggtaagaaaaaaatgtattaggatcaatatcaataggcataaataattctattaacaaataacattaaacattgttacactgtttatgggatgatatcattatatcattatagaaagattctcccttaatttaaatacctagcatgtacaaaacaagtttaaatcaatgagacagtaaacaagaggaataaaatagagaggtgggctgggtgcagtgattcacgcctgtaatcccagcactttgggaggccgaggcgggcggatcacgaggtcaagagatcaagaccaatatggtgaaacctcgcctctgctaaaattacaaaaattagctgagcgtggtggcgggcgcctgtagtcccagctactcggaaggctgaggcaggagaatggtgtgaacccagaaggcggagcttgcagtgagccgagattgagccactgcactccagcctgggtgacagagcgagactccatctcaaaaaaaaaaaaaaaaaaaaaaaaaaggggaagtggtgtcctaaagactaaattaactgctgactattttctattttcagtctctacatatttatatttttatttctttatatagcattgaatggttaattccccatttcccttttattcttatacgactaacttctatgggttttattttcattcagttctgtatattccccctgctgaagcctcccatgttgtgtgtcaagaggaaaaatatcttattaccttcttgtctgttgaacatttagttttcttctccctccctccctgtcttgtacctaatgagcaaattatctaaaaatagatacgttcatcattctacaaaatgttgtatcttctctagattggaggacagtgtaattgtaagagacacgtgtctggcaggcagtgcaatcagtgccagaatggattctacaatctacaagagttggatcctgatggctgcagtccctgtaactgcaatacctctgggacagtggatggagatattacctgtcaccaaaattcaggccagtgcaagtgcaaagcaaacgttattggtacgtgtaacgcaaaagtttacagtcacatctctattaccatctggaataaaattctctatttgatttcttaactgaagagtaaagcaaatttctttgctcaagacaggctggaaaaaaaaacaatttggatgaaattaactgtttaaaatgattaaattaataattctatcaaactgcagcttgaagcttagtttaatcaaccctttagaagtttctttattctgtagatgcattaattcccatggtcccatactaataagtcatagaaaaatataatttgcttactgcatagatgtttcttttagaaaattagcactttttcaaaatgttttacacttaatgagttctaagcaaatcatttccatgctagttttcttaatagaccaaaataagtggattttttcaaaatattctgtgctacagggtcctttgtgataaatctttccatttttttctgttatatttctttgaactgttcctatgaaatgcaaaataagtcaacataattctacagatcatgtatattgctagggttacttacaaagggctacataattttaattttgtaattcagcaccaagttgattataataaacagctgccttcggtgttatttatcatttttttatacaagacgtgcttttttgtttgttactcccacaggtatttttcggaaattagatttgattatagcaatttattacatccaacatttttgaggggaaccaccgccacataaggacaaaatttatcaagtgcctaaaatgcactatgttcataatgcactttgaaattttgatatatgagaatattatgagaggaaagtttcctgatgaagtgagccctgtattgtaactgaatatgtcttggttcctataggaagtttaaaaaagacctttgcctttctattgtcattcaagacaccaagtcatccatggtttttctaacactgacctgaaccttacaatagtaaaaatatgcctggcagtgattacacacactcctctctctctctctctctcacacacacacacgaatgcttacatgtacacatgcatatgtacatatcattctgaatactattttcatttctgtgatatacctctaaatctaattctttatcttttatttatgtaagtgtacatcatgctacacaattcagctagacaagcgtttcaatttaataaagagaatgtaggtgtgtttagtggcattacacgagatttctctggtttaaagaaacattacatgaaaatctgtaccataatttacctatatgcatctcaagcatacagaaactaattttttagaaagaaagaataacgtgtaaagagaagtacatatttgtatgtgctatccatgatgctgaaggaattctaagaccctgaattcaatttgtatggcatcctttgttctttaatgtgagatatattttaaactcaagatgtgaaaacaaaagttaaagcaagacctttaaagacagtgaaataattacttctttgtatcaatggaatctttcttgtgatggttagattccagagcttgaggaagggaaaaatcaaaattaatttagaatgtataatgccatccctactatttgcctgttttgttgattgatccagatggttttctgcaggaaacataaatatatattttgtgaagactaaattacttcagtattataaataattattatttctagtgttatttctgcaaatgtagtactttttataaaaacaaaaacttgatatgcatatatatttactttcctaatgggatcagcaagtaactttattcaatttcaccttgttaatatgaaaaaaaaagaagcccagaaaatacaagtgtatgttgtatacgcttcagaaagcaaactgttagagttaacaaaactgttaaatcttactaatgattctatcaccagtaaaatacattagcaccaataattttattaaagtaggtcattcatctagaataaaaagggagaagaatgtgaattaaatgccaagtgtgctaactcgcctgtacttgttaacaccgaatgtgatgccctgtaggccttcctgactatcgttaggaatagattacctgtcaggaatatgtatggcatattcaaataagcactgtgcatatttttaaaactgatatgatatgaatccatgtagaccaattttaatagttcaaaatgagtcataattcttgttaacaatacagttatttttaaaatttgcagcaatagtggtccttttttattttccttattgaaattaaatgatatgccttaggtgagtcattcatcactgttaaagaacttgccttcattggagttcttgaatttttatccatatatatacatatatattatgtatttccttccagtttaggaaatgcttttctacatatgagttcctgagtatgtttttgactcttattttaagattaatttttaaattgcaattatagcttgaaataaatgtttcagttgattcaacccatgcagtgagttatttaaattcatggatatttggaaactatctaaaggaagtattttgcatctaaacatttactattctaatttttttatttctttgccttgtaatacccttttatcttttagaataaccttacttgtcagagatttaagtttaggtgataaaacatttttcttcattcgtaaaatgtatatgtgtactcctttaaatagaagtaatataaaaaacagaatttacttagtgtttaaagaggtatgttctgagtcacacaagatgacaagcaatgtgattgctttatgagccaaggagagcatgatttatattaattgaaaatgataaaatagaggagcatacaaaaggattaaaccaaaaattgccctggataagttttatttatattaattacttaaatgtgtggattcagaaataagtgtatatgctgttttcacaaaaatagttatcagctgacatttttttcttttttcccagcttcacgaaggtataattaaataaaaattgtatatatttatggcagacaacatgatgttttgatatatgtacacattataaaatgattaattccagctaattaatgtatccatcacctcatgtacttatcatgtttttggggtgagaacatttaagatctaatctcttagcaattttcaagtatacaatacattattattaagtatagtcaccatgctgtacaatagagctccagaacttattcattctgtctagctgaaactttgtactcagcttaaccttttattaaacatctttagagatttcttatctttagaaaaacaactaatttgttatatgtaattctactataattttaaatgagcacatttgttaaaatagtttttaagatttgttaaagagaaaaagagctccagcatatgtaacagaaacaacatttgcattaagcatttttctttgcattaagtaataattaaaaatttatgaagttcatcgcaaacagttgtatattaaagctaaattaaatattgtcattgaattttgagagtaagattggccccctatggcattgcttgtgagaaaacactcaatattttgtgttcgtatcatctgcagtagcattgtttgtgtctcgtctatcttgaatgaaatcattttcccatcctcaccttttaaatatattttatctttagggcttaggtgtgatcattgcaattttggatttaaatttctccgaagctttaatgatgttggatgtgagccctgccagtgtaacctccatggctcagtgaacaaattctgcaatcctcactctgggcagtgtgagtgcaaaaaagaagccaaaggacttcagtgtgacacctgcagagaaaacttttatgggttagatgtcaccaattgtaaggcctgtgactgtgacacagctggatccctccctgggactgtctgtaatgctaagacagggcagtgcatctgcaagcccaatgttgaagggagacagtgcaataaatgtttggagggaaacttctacctacggcaaaataattctttcctctgtctgccttgcaactgtgataagactgggacaataaatggctctctgctgtgtaacaaatcaacaggacaatgtccttgcaaattaggggtaacaggtcttcgctgtaatcagtgtgagcctcacaggtacaatttgaccattgacaattttcaacactgccagatgtgtgagtgtgattccttggggacattacctgggaccatttgtgacccaatcagtggccagtgcctgtgtgtgcctaatcgtcaaggaagaaggtgtaatcagtgtcaaccaggtaagaaagaaatgtattacattttcagtgcacaatgacattccttttgttaacttaggtaacttctccctgtttctggtttgtggcttctacaaattttatttccaaaatcattactgtatttatatcattatccaacacatatataactatttaacttattcaaaattatctgcatatttatgttactattttgagaggatactttagataaaactcagccgatcggatttatttcataattgagactcaatttctacacttgaagtaaatctcctttttaacagttttttaaaaatcagatcaacaagagtcaattttattttccagagaaaggaaaatttgagttgaatatccatacaatgccaaatattcaaatgatgaactaaatctctgaataaagctggctaaatgtttttgctgaagaggctatatgttctagttttatatagaaatacctagaattgtttccacatgccatcaaattaataaaataggccactgtttaatctcattatatacaaacttatctttccatctctttcccaattgggagagggatagaccccatctatggctctccttacatttaagattttaactaaaatactataccttctttacaataaattcattatgatatgatgataaatataagtacttatccgttgtttaacagctgtgctaattgttgtcctgtcagccaatattagctctgagttatatgggtctataaaaatgagcatgataccaactcaaaagtgtgatttgcttgccagagaaggagtagaacaaaagttctgttaacatagcaaagaatccagcctaggataattgggccatgcttttcctttggcattggtcagtgtgtaagatcaaagagacaagaaggaattgatgaagagttcattctttttgtgatgtaagtattaaaaaacaacttgaactggtttaaacataaatggagactatattataactagatactccataaaaacctaaggagaaggaccactgcagtcaggactcaggaattagaatgcttccactgatacatattcatttgtctctctctctctctctctctctctctctctctctctctctctctctcagaaggggactttacctctctctttctctacatgggtatatggccaccctatgtcccctgaaattgtttataattctaccaccagccacaacagagcgatttattagctacctcttagttataatttctagaggaaaattcgaattgactcagttttgtttggttggttacctctgagccaattcattgtggccaggggtgtcacgtacttataaaatgagtatagcttttagggaccatttcatcaggtagaagcaaggtggtaagtatcccagaagacaggaagattatggagacctgggcagacagcctaaatgacagatacagcacattcactctttttaccttcaggttaatcctttcaaatttgcaatcaattaactttttgatatcctaagatgagatgtttttttctcttttagtgtttatcaatatctctaattttggcaacaaagtcctttgtctcctacacagtcaaataaccatgatttatacatccttctttctaagtaaaccaaaacaagctaatagatcaaatgttatatccttttgagtaattatcaattgttaaaatttactgttccagtctaactttaattgtatgtataatacaagtcacatgttttaaacaatttttctgattttggaaaaactctgaaatcatagttacaaacatttgttccctttggtccttccaatgaaagacccaatccatcatctcaatactttgtacacctaccagatatctaaatgatgaactaaaattgttagaaaacctttgtttttctggttgttttgcatatcattgcagaaaaagccatggataatttaatctacaccatgcataagactgtctcatttgttcccttcctaggatgaagaaatactgacttcattgctctttcctttatctttgtggctctcattgtggtgatctctttgttcccaactctaagcccttttctcccacccaaatctatggctctttcctgtctaccctatatagtattggcagaataattcccctaaagcacttaattcgttatgtcattctcctgtagggttaccaaaaatgggttttattttgcttatcatttgagtccaatctgggcaaacctttatgagtttttatcttccagtcgcagtctagacacctagctttgcttcctgatattccctttctcccatcttcttcagtcactgcagccacttcactggagctacacatgtcacatgcagagccgatttcaatctacctgatgctttggttcattctcctttcccgacatggaatgcagtataatcctccttttcaatgttagttggcatcctctgactagttttactactcaacatactgcctaaaattctccatcactcagtgaacaacaaagttgacatgagcatcagtgttttaagaggtggtttaactcaaacctatagaaaacttgaaaataaggtgtttttgaaaatgtgctcaagcttctattgtcttcatgttcaatttattatatgaccttgaagagaggtttatgttcaagaaataataatacagatctcattgtaattaccccataattatgcttcttttttctgaagaccatatggacctataaatgaagtcaatgagttaagagtagggagcattaaacatggtgaaaatatttttatttactgaaaaaattcaacagcgtattgtaaaatatttagtagaaaatgtaccagactgagaaaacatatttggagctccatttcttcagcttactgactctctaaaggcattcccctgtccttctctacagggaacttccatattttcttccaactgtccatttctagccaggggtaagcagatttatctttaagctgttacctgagtggagcctgtatcagttctactcatatcctattgatcagagctgctttgtatatccatacctcactgcaaaagaggctggcaaatagatgctctatctgaatatcaaggtatatatttaaaacttggggcctcttttattataaggagtaagaaagagattgatccttgaagacagccttggctatactaggaatgtcctacacctaaaaaaattagctggcagaacattagtcaacttccgaatagatgcttttaatgaccatgagttttgtacttttattgatagatcccattattatcattttttaaaaaaatcagccaaagttaatgaaggcctcttgagtcctgaggaaatatatgcacaaaatcccttcttgggatcttcgactgtttcttacatgctttgccttatagactcactgctattctagtcactcttccttccaaggacatgctacagtttatagtggccctgctgagttattgacccaggatattaacctggttatgaaaagctagaatgatcaagctacagatttggattattatattttgttgaacagtgcagttattttcatatagataaacatttctcttactgagaaatcattttcttctgggtactgttgagttcttaatttaatcagagaacattttatgtgtagtagcaaacggtactttcagtgagcttaaattttgatggggaaactgacagaataatttgcaaataaatatatgatatgaatttaaatagtgatgatttttggatctgtggctctactcaattatgtttctttcttgctaagagtttaagatattatcgaggttaccaaatagactatttatttagcacttttatatcagtgtttagtttccagaaaggtgaactgggtagccatgtttatattgtacaagtgaagtcacattgatattttattgcaatggaaacagtaagtggtttaaaaggaggaatggtgaagtgaaagaaattatcaacctgtttctttttatattattatctaaaactagtcatttttctgtttttctcttttgcattttttctcatttaagatcataagtgcctgttttaaaaagcagcccaatgagatgaccttgttaaaactcctgattatttctcagtatcgtcaattaaatgaaccccttattgtgtgcccacaatgtacaaggaattatatatacatatatatatattttttttttctttttttttcttttgagatggagtctagctctgtcgcccaggctagagggctagagttcagtggcgcagtctcggctcactgccagctctgcctcccaggttcatgtcattctcctgcctcagcctcccgagcagctgggactacaggcctggctaattttttgtattttttttttttttaaagcagagatggggtttcaccgtgttagccaggatggtctcgatctcctgacttcgtgatctgcctgcctaggcctcccaaagtgaggaattatattattattgtagttatgcaagttgaataaggtaatccttgccctcaagatattgaaactttaacaagggaaataagacatttgcacaagtaaataaaatacgataatactttaaatgtgatcattgtttttcagtattagtgttgatgcccattctacatcttcctctaaagaaaagaagacaatttgcaataaacctttggaaaggagttttgttgcgtctgtacttaggcaaatcgtgactaagaagttattctcctaatggccgcacatggtggctcatgcctgtaaccccagcactgagaggctgaggcgggtggatcacctgaggtcaagagtttgagaccagcctgagcaacatggtgaaactccatctctactaaagatacaaaattagctgggcatggtggcacatgcctgtaatcccagctacttgggagactgaggcaggagaatcgcttgaacctgggaggcacagattgcagtgagcagagatggcgccattgcactcctgcctgggcaacaagagccaaactccgtctcaaaaaaaaaaaaacaaaaagacaaatatataccagataaagtcctccaaaaaaagagccaggaaaagagaaaggagaccaggagggggttgcatgaagaaaatttagtattattatccagtattgccattgtttaacataatttgagttttaatcaaaatttacatttgcataatttaaaaaaccaaataaaatgtaaagagccctgccttatcattttcctaggaatttccgtgcttagagaaaacaccttcaactcctttagatgtttattctgggctttcatgtctgtaattctgggttttacatatatttcaccttgatttttaaaatgtagatattatctattgtcttcctcctatagaagatgaatgtttagctcctttcacctcctgcttagcaatccctttatttggttaaatcagtattcagagatttctttattatgactatataaatttactgtacagctatgccatataatatgatttgactatattttctttgctcaaaaaatttgtcttccttagtttttcaggactctctttggcatttctaggaaacaaaactctccaagggaactctgttcaagaaatctatcaggttttgttttttcccactagatatatgagtgggaagttcaggctggttgatctttagttctgttgcacagctatatccaagggctaacatttgctgctatactagggatttccttcccctgtctcctatgttggatcctccatttcctgaatcctacacgttctctcttcttggtttatttgtgtatttggtagagcacatgttctagtagcttctgaaaaagaatacaaggagggaagtaatttgaggagaaaattttgaatatctgaagtgtctttattgtctacaagtgtctaaacataaagaacgatttgaaattttactattatatgaaaacttttcattaaaaaaatttaaatggttgtaccattagctgttagcaatgttaatcagattctttcttcttttctacttttttttttttttttaacgacctggaagtttttaccatctctatatccctgggcactcagtggacccttttgcctatcagtgatggttcttatgttctgagaaaatctgcaaacacattcatagcaacatctagactcatgttcgaccaaacagttggacaccaagcctagccaagttgatgcataaaatcaacaatcacaagcaacctttcacataatgcctgtttacatacttgttgagtccagactttctttagtttaacttctaaaggaaaagcttactgcatcttcctgaagtgtaagagggacaacttcctggttggggaaggtatttagcacaccttatatctgacttcggaaatctctggggctttcaattccaaacctttctgtctagagttacacaacttgaataaattagcttattgtcgggctctccactgcaagagcttagctttttcttataggtatctataattgattgtcatttttctccttctctcttttttttttttttttttttgtttatttcatctctggggatttcaggagggaaacattattcaatctaccatgttttactgacaatgttcccctagtgtttttgaggttttaatcttttcagaccaaatctttgcagacatccttgagccctctcttttccccacaacctttgtctcatctaataaaaccaattctgctgattttaccttcaagtatatccagaatttgaccacttcttgccacccttacttacaccagccaggtccaagccaccttcctctgttcctggactattcaagtagcctcctactcccctttatctttcttccatcacttctcaacagacagccaaagtgatgctgttcaaacttgagtaacatcccatcactccaccttccatttgcttttcaccatagctaataagaaacaaagttgatattctttaataatcctcatggtctataatgtccatgaactctctgacctcatttccacaagtcttcagatcatttcttcctctccagccaacaagcctcattgctgtccttcacaactgttcaatgctctatctcaggcaggtataaaagtacctccatagcagtgctccctatatattttctgaattaatggataattatatttcaaaaatacctcagtggcattctcctgtttttaggtgtgagcctagcaaaggtctgtggtgtttttttcacaacacttacgaaaagcgttgtgttcaaccttgcaaatgaggaaaaataacagtgacctaagtatcatatattttttaacaaaacaagatatagtctgcacatattcatagcccacgaaaagagcaatgtgtgctttggggtggacatttttttattttttattttttattttttttgttttgcttcagaaattccactttaatgtttttttttttcctggttttatggtctcttacagtaaaacttgcattgaaaagagaaacccttatcctgaagtatctttatcataaacagatgtttgcagtagccagccctgcaatgtgcacagtaaaatgtgctgctacaatctgaagctttcatttacttatttaaacatgtctgagagacctagatcatataccacaggggcagacagcatgctggtgtgtgagcagtggggcatggagggagaaggatggggtaggaagggatgagtagcaagcttaaggacttctgcctccctttcatctgtgattgcaaatactgctgacccatagtagatgactgcacatagattcttgtcccactttcctaaaaaacattattaaggaaggtgcatgtaatgaaacctcatgtattattaacctaaccttactacgaatgtacaaggaataggtttaattcaagtaaaatttataggcaatttgttaaagcagcagtgcacattagaaggtacattagagacacattggttttaatatgccattcaataacttgaacagaggttaaaaatgctgcttaacctccattaagtattttaaaaatgctttaatttaaaattatttggagtgtgtgtacatatatgaatgtacacatatccacactaataaatataacactaaatatgttttcccagttccctttttcagtgctggatgaccttataatgttcagcagtaggcacttaatcagaggccaggccgaggaaggcagggaaggatgtcaacgcatcccgagccagtgacccacccttgtccttgagaactagaggcagagagtgcatattgaagactctgtagctttggaataaaacaaaggctaatttataatgaaaacagcttcctatgacatgttttgtactaatagggcagtgcctcctgcttccccctagtatttacttttggttttcttttacaattcataaaacaaagtatcttgtttcattaagtagcacatcatatttattaagtaatgagctcataaactagaattgtgtacaagaccctgccaatggaattggaatcagatgctgatgttccattaaaaatcaatgcatcaaagttgatatccaattatgccacatttcctagtgtttggtgagacaactttctaggttaacatgtttttcacagagagacctgaatctaaaagtaagaacctcttccttgataaatcatcaggaaggaatcttgtcacaggaaatacagaccacaatcttaggtacatctggaaaacaaaaaaaagtaaaagacactgataagaaaaatttctctgtcatagaaaacttgctaattgacaattacaaagatgataatagataatgtttactgagagtccgctgtgtgccaggctctgtgataaggttttgcctgcaaactttcatttaatatgcacaatatttctaagatggaggtgctgggattattctcattttaatctaattgggggaatgaaatctaattaagtagaagagccatttataagtccaggtccatctgactccagaatgtatactctgaaagagtggaactttttctttttctttcttttttttttttttttttttaagacggagtcttgctctgtcgcccaggctggagtgcagtggcacgatctcagctcactgcaagctaagagtggaactttttctaaataactaactcaatatttatcttacacattcacacaacaaatatttgagggtgagttagataaatactgtttatttcatccactttcaagcatacctcaactcatgattctggcttactgcttcacattctgggatacctcatttgttgttcaaaacccaagtagtaggcataaaatgaaaattaacagagtcctgggaaaccacagagttcaaataatgatgaggtaaattgaaggggtctagaaatggaattatctccgagaacttagttggagaaattctggagatggttggaatggcacaggagacaggctttagagcatgcatttgataaacactgaatgggaacagagaatataagttttgctgtggattttgaatatgcatacacatacatatattaattataatctccaagatgtaatcagagttgtcattatttgggttatttgttgttattggatttgattcttagagaatatgttaatgagggcctttcatgggtattcacataaatagaaaaattggattatttatgaaacagaaaattccaataatgttttcccttacatgagcatattattatgtcctttgtttaagagctaagatatagttttagggtgacattttctttctgcagctctgttccatctgttgctgtgacgagcactatattttaaatttattgtgtctgatccatatacactcctctctagactccctgataggacaggccactctgaccaaccactctcatgactcacagatttatgtttaccattttccttttcagtgttaaagggatcatctcatattttagaggatagaagatatttatccatctatccacccattcatccattcagctatctatccatttcattcatacatctgtttttcaataaacatctattgagtaaattaccagagactatgttggtgttaaggtatacaatcacaaatatactaagacattgtgatttagtaggggaaactgactcacatgtaaatgtatcacaatgtgatgagagccatattagaaatatacaatatagagaagtagtaaagtgaaggaaatgattaattcttgaaggatgaggggtcttaggaacttagagaaaatgatttctgaactgacttttaaaaggaaataggaatcagcaagctgctcaagaagggagtagcagcccagaaaaaaaaaataacagcagaacatttaaagcatacctaatttaattgaaaaacccttaaaaattgttttaaaaaagagaaattataccttgggatgaataatattaatatttatgtattcacttgatcaagtctagaagtaattttagcgtgattttatataaaactaccaaatggaggaaaattattattgttttaatttgaaaactaccatcatcaactatactgaaatatagtttacaaacaatacaacaatattgaaaatattgattcataaagccattaccaagatagtcttttgttgcatggatataggtgagccacccatccctccccaggctcttgtgtaactattatgtccattttctgccttaaggtgagagtagtttcttctaaatgtcttacaattagtgcttagccccagcattgccctcctttcttgaataaagcctagaggttacacttcttttctttctccctctcaagaccttggcaaagcctagttgttcatggtcctcaggagagacattgctgggaaatgggctcttcttttatgcccaggacaagtactgtgctatgcaaatagccgctgcaggagataataccagctgccttgctaataactttgaactctgtagattcttctcctaggcaaagccacactattttacaatatgggtgactctttgttttagctggatgatacatttttttccacttgagatttgtcatgtctaaaaccaagggtcagctaaataatatgggaaaataataaactagcgagctgatttggaccatgtatatgtgaactctcagcactacgtaatgcaaggtaataatgttgtcctaatgaccatgcttaagaatgtggtacaaaatcattcatggaatgaaatctcaatatgatcagttacaatgctacagatatataaagatttggaacatgaagaagagctaacaaaggggtatcagaaatgcattacattaaagtaaattgaggtcagttataattaagccacattcaggagttgatgtttaagtggaagggaagggaaaagattgttttctatagttggaagtcataaaaggaggtaatggtctagaattaggcacattcaggtaaggcaagaggtaatctttaagcaggaagttacctgagtcatcctaattagaactgcttaaaaataggacagctaaaatactggtgggattaacctttataatcaggctcctgagaggaggaggggaattaaccccaaggcaaattcccatgcagtcttttcctggaagccctaccttcactttcagtctccctaggtgctttagcatctttttagttcttctctgcttgtacttctgatttttctgtgacattctttattccccaaaacttggactacccaacttctgcaccaaaatgctatcccctacttgtacttacaggtttatctaatacatcatttcttctaaaaatcacccttaatttttccaaattctctgtggcttggagctattgcagtaagtctaaattaattctacttgtaagtatctgtgctaatgggtaatttatccaaattggagagctgttagcacattcatgatgccatcatcatggatttaagggcctagataccttcacaggaagaaaaatacaaagaatcacaaccacagtggccttgaatttaaatggaagccttctgaatttgactttgatcatgtgatgaatcaggtacaagaatatatactaattgtcatggccatgctctatttctggatatgtatatataagggaaattgctgtcaggtggtacaaataaacaaatagcgtaacctggctgtaaattatgataaaaatgatagtattagttgatttccgccaactgaatggcacatattttgagctctttcttttcctctcattgagcacaatgttttctattttgctgcccttgaaactttgtaagacagaatgtataggatctaggggaaggaaaaaaacccaattgttggtaactataagaaaatggcttgttttcaacaagagcctggaatgagttttagagtatcctaattactttttgctgttccctatataatagataagagaatagattcactttttgctcatgctctccttctttcaatatcattgctattttatgaactttaaattagtgtcatgacaattgtacaattcatttttatttgctgtaactgtattcattagaatccttctgtgatccttctaccccattgtttcagtaaaattctttgcagcattttgcacgggcttgtgtgtgtacccatgggtctgtgcatgtgtgtatatgtatatgtacacatacatgaacacacacatcacacaacactaagaaccatttctccctcatatgcctgctccacattcaactgcctgataactttctaattctataacagttaacttccatctcctgggtctgaagagattttaagtaatttgaataaacttttgaatcatatttgtatttctttcctttttccataagaaaaaaaatatgagttttagaggtaagctaaagtctctaaattctgcaggctttttttgtgtgtgtactacttgcagggctcacagcctgtttaataattgaactcatttttatttgttcatcgaatgtgtttggaatgcctactatgtgccaagcagtgtactggctgctagggagacaatgatgaatgaagcagatgggttttctgcccttatggaagttagattttggtggaaatgagattgattataattttcatgaacacttaggaaacaaacaggatgctatgcatttgtaacaggtatacctagcctggcctagggaaagttgcctgaggaagtcacgagacctgacttacatgagtgaactgagcaacagagataggtcaaaatcatcccagcagacagaacggcccatgaaaaggcctttaggtctcaagaagaggaacaaatatgactgcaatggactgagcggggggatgagccatgagctaaagctagagacgtagctgggacctgactgtaggattgaaagctgagtgagagatttggatttatttcctaaagggaataggaagtcatcagttagtttcaaatagagaagtgaaatgtccaaactgcactttggaaaaagactgctacgaagaatagattggaacaggacaagagggatgcaattagaagagatggcctccgggactgggtggtctgggtgtaaacctgggttttgctatccattaactctaccattttaggaaagtgtgttaaccttctcaatcttctgttttccaattgacagaatagatgtaataataattcatgcattatttgcatttctatgacaactaaatgagatgctcaagataaagcccctacagtagcatctagtttgaagtattagttataaaaaaagtggttggtgactttatctgggaggtcgtagcggggatgaagagtggaaggtttaaaattgttaggaggcaacatccataggacttggtaattagcaaaatatagggggtcagagaagtggaggatgcaagcttttgttttagtaaaatacagaattagtttaatttgaatttcagataactttttttagtctgagcaaatgctgcatgggctgcacctttgctaaaaaatttcattatttgttagaaattcaaatgtaactggcttcctatattttataagtctgccctaccaaaggtacctcagtgttctaggcaaagcaactgaatgactggtaatatctgttggaatggagctgattagaggaggtcaagttttttgtagaaatattgaaatattgcatggtagattttaaatacattgaattgtaggacctgggaggcacccaagtccaatgtagataatttactcagtttttctttggtcataattgacacactgaaggacagatataaccacatttgtattgggaattagtgccttggtagagtattctgtttttctgtgtaatcaattattatgctttaaataaaagagtggataaaaagtatatataaaacttttaatttctttatttctaggtttttatatttctccaggcaatgccactggctgcctgccatgctcatgccatacaactggtgcagttaatcacatctgtaatagcctgactggtcagtgtgtttgccaagatgcttccattgctgggcaacgttgtgaccaatgcaaagaccattactttggatttgatcctcagactggaaggtacatctttataagctttaataatttaactctttctttagcaacagttaactttttttggcagttgcaaagcaataacttctgtaaaaagtattttttttgcccggcttggtggctcacacctgtaatcccagcactttgagagaccaaggcaggcggatcacgaggtccgaggtcaagaggtcgatatcatcctggccaacacggtgaaaccccgtctttactaaaactacaaaaattagctgggcaaggtggcatgcacctgtagtcccaactactcagaagtctgaggcagaagaatcgcttgaaccgggaggggtaggttgcagtgagccgagatcgcgccactgtactccagcctgggagacagggcaagactctgtctcaaaaaaaaaaaagtgtttttttgttattgatatgttttttgttccgtgacatccacatttacttaatgtatgctaatctttgaatatttcctagagtgggttgctatatattgatagatgtggcccatcctagcatctgggaatgttgaatgagataaaatatattttctctcaaaaagctgagagtctggatgtggagaaagacaggaaaagacatatctgaagaagaaaatacacatactcatactttctctctctctctctctctctctctgtctctctgtgtatatatattatatatatatattatatatataatatatatatatatatgggatatatgtatgtgctttgttcttcattgcccttgaatttattgcatatttattagttcattgcatctatttatattttccttgcgtttctaatttagctttaaagactggcagatgagaaacatagctttgtattctgtgatatgatttttttcagtatgtaaagtatattatgaaagtaaatcatttttcaaagttacactctctttaatattctacttcttattctctgggtatctgtggccatttgccttcactcatttgtgtttattgctgtatttttgaagatgtgctataatgccaattctgtgtctgtgtgtgtgtgtgtgtgtgagagagagagagagagagagagtgagattatgagcttgtctaaagttcagactaaatctatgaattctttgaagctcctatccctgagaagctagtagtgtgtgctgaactcagaaagcatgtaataaaatgagtcaaatctgtctctcaatatgtgtatatttataaatctaattgctaattatttcagggtttgtgattatctgggctcttttaaactcattgcccccctgctgcctgccttttggctgttccactcctcattaacacctccattagagggtggacaggtgacagggtaattactgaaaaagaacttaaactagttcattttgactttcttttaaaatttgatgtgatttttaaaaactacaaaaatcatttaaaattttattaaaataatttttgttttcttgacatacatgcatatattttaatctgtgacgctctacttctatcaccgtagaaatgttaccttgatggtctgagaccattgtgactcttttctacagatgttattataaatcatctaaatgagtatacaaagcgcatggtacagtaaatagtaaataaaaagcactgtcaggattttgatagtaaaataggagccagttactgcacatactagctcctagatgtaatttttttgaaataatattctacagattccccagttggaactcttgggctggtttgtttcactcctggccacctctgtctttttcatagttctgaccacatttaccaggagaaaaatatcttccccaacccactgtcctccttgcaacactcattcccatcagtgccattttgtgacattcaattacccatttttgttctactcatcccctttgtcagtcttcccagggttatcagcaaaacgcctgctcagtgacctggggatgtctgattgtctcagctttttcacttaactttttttctttaagtgagatctgattcccttcattacactgcttcctctaccctacaatgttcttaaattcgtggctgagccttttaccccattctgttcctctcccattatctacccatctcactctcactccccaccttactttagtccaggaacaagaattgcttaataagtactgttccatcacctgtcactctgcagtaggcctgactagcactggagctagattccctgggttagaaggtggatttaaatgtttacataaattgataaggaataggaaggaccaaagaagtgggtataagctacatttttagaagataccgaagttacaataaagaaagaattcagtctaggcactatggctaactcatgtaatcccagcactttgggaggctaaggtgaccagatcccttgagtccaggagtttaagaccagcctgggcaacatggcaaaaccccatctctgtaaaaaataaaaagttagccaggtgtagtggctcttgcctgtagtcccagctacttgggaggctgatgtgggaggactgcttgagactggaaggtcgaggctgcagtgagtcaagattgtgccactgcactccagcctgggcaacagagcgagaccctgtctcagaaaaaaaaaagcaaaaaagagagagagaaagcagacttcagattcgcaaaaagaatgaggggcaggttggagtctagaaaatagagctaaagtatgagaagctgagtagatttctaaaaatatgaatgattcagattaagtgtggggttttttttttggacagagtctcacactctgtcgcctaggctggagtgcagtggcgtgatctcggctcacttcaacctctgcctcccaggttcaaaagattctcctgcctcagcctcctgagtagctgggattacaggtgcatgccaccatgcctggctaatttttttgtatttttagtggagacagggtttcaccatgttggtcaggctggtcttagactcctgaactcgtgatccgcccacctcggcctcccaaagtgctgggattacaggcttgagccgagtgtgtgttttaaacaaaaagatccacaagttttatataaatgagtttggatatctttacatattagttggctcctgttatattgatgggggtggtgagattacctttttaaaattacaaattgtccttggaaatggtcgcacttttcttccatccctgtattagtccgttttcatgctgctgataaagacatacctgagactgggcaatttacaaaagaaagaagtttacgggacttacaattccacatggcttgggagacctcacaattgcagtggaaggtgaaagacacgtctcacatggtggcagagagaagaaagcttgtgcagggaaactcccctttttaaaaccatcagatatcgtgagacttatttactctcatgagaacagcaggggaaagaccctaccccataattcaatcacctctcactgtgttactcccacaacacatgggaattgtgggagttacaattcaagatgagatttgggtggggacacagccaaaccatatcaatcccctttgttcttatctttccagttccaggttttccttttcagagggattctatttttctcccttttctaactcctgccattattttaaactactttgacatgtactgatgcagttctttggcctcttcattcattccccactccagcaacccatttccatggctacaccctggattttgtgatcacttataatttctctatttctcaaatcttcctaatcccatgaatgctattctatggatatatcacatctttccaattccaattcaccctggaagcctcacataacctgctccttaacttctcttaatctttatcccattatccctccttaatcctcttttgatcaaccccatccctaacttcactgtcttctacttctagcctgaggcaaaacctttttaattatgacccttttgagtacctgattgtgggctcccttctgctgtactgtggggtcagctccagagacgatcaccctacacctgccctgatctgtgaggacgtggggaaagatcatgtgcctatgctgatctgaagcactaccatgtatgtacttcttatcaatttactttctttccccctttaaactcctaccagtctcctcagttttaattccatgctcttgcccttgcagataatctggccctctgctcatagacaaaataaagccagatatatgtatctccagattatcttttctccacctccagcttgtctacattgtcacacatttttaattttttatctagtcttagaagaaaatcctgtgtatttttgcctaaaaataacctgttcccagtccttgatatgatcccttcctgttttcctactcttgttcctccattccatgatctttgctccatcaaatcctccctttattttaactcaaacatctctctataggtaatatcataactgcctacaaaaatgctattcattctacaaactccttcctttgattctgccctgctttatgagccctgaaagttattgtctaatctctcactcttcattcacttactaacatttaaaaagagcactatgattcaagaaaacatgatttaaaaaataaaagatcagattttttttcttcttcattttgtttctttctcattcattctttattcaccatgtgtggtacatacatgttagcagaacatacaagttagcagaacttgcaacatgcagacattcaagaactagttatgtgactattaaattctcatccaaatcaaagacaaggtctataaagagatataataaacaaaaatgggttaaggaaaagacagaatgagggaacaggtttcactggtgggaaaaagggaggggtcagtggtgctttccacttgagtccagtgagaaggtcttatttgatcccttgaagggtgacatgtgtctcctgcagttggagagaccagtgcattgatatctatcttagacctggcaaatctaactgagaagagacagtctacccaggtttggataggtaagctagaagacagtgccctgcatatcttagactcccagagttcatcatgacaaggaagactacgtatttctcatgaccggatgaagaccacaaggaagaaagacagggtaaggttgtcttagtctgtgctcaaagtaccacttagaagataaaggggcctgtgtagaataaaggacaagattactgtggactacaggttaataagcaaccagtcgaaaagaaaatgcatctgactgcactaaaacaaaaggtgagagatacctaatggtgagaaagatcaatgaagaagtcaggaatgtaccactgtcagtgataagtcagttttatgtatatgcaggaccagagacaatagactgctttgggtggttctagtccaagtgagtttctacccttcctgcagcctctacgtgagggaggaggctaaccaagctaccttctctgattatagacttgctgcctttatcatgtcctagcttgatgaaaggaagagaagtatgttcttgaaaatgtctgttctttaaataaagattggaatgttgactaatatacaggattagactttctattttctgaattgaatttgtattttgcaatgtaaagtaactgtaggacattctattgcctgagaaagaccagaaaagccaagtgactaactcattttatatccacatggaacatgggggaattagctccatattatatgtttaaagggtcagtgaaagacaaaaataaaactgatttatgattgcttctcatgacttatggtttctcaatgtgctggtcatttcattgttcccatttatttcttaaaattacctcttcctttggtttccaagattctacttctcttatttgttttctaactctttttttggctactcctttttaatatgtcctttcaatttccacaactgtgtccctgatttcaaccactacatacatgttaatggctttcaaacacatgatcacccattcagatgcctgccacgcactctaggcctgtagccagctgtctctctgagttttacgcttgcaagtccctcgtgcatttcatttttaatatagtcagcacagaactaaccattacttcctcatctccacccaaataaaaataagtcttatgccatctcatgctatcatcatcttggtgaaaaagacgtaaaacttcaaataattattcaagtccaaacttcccaagtttgagtggggcttagattcttctcaggtttggcagaattggctctgttgttgagtagaatgagtctacaggctactgctggaaagtgctatggaaagcaagagctactgtatataatgcagcttctctaaaaagaatagaaagaataaagcttcccatggccatatgggacccaaggagatcagcaggatttgtctcttactaaatcagtcgtgtggaatgctggtaacttgacttgaccctcctatcccactgatgaattcagctgtctcttttcacttcaacattgataatcattacacaggaaatcctgtagcacagaagggcatggagaaggatattttaaaatgtgacaatgagaattgcttgagtttggacttttgttcaacattgaaaagagataaaagtgggttctttttaatgtttttccattcctcttttgaatgataccgttcttgaatctttttttgacttctggttgttattgtatatacaccaacattggctatattgaaaatgtgtaacaattgactaagatatatgggattccatcaagtataagaaatttttgttttttaaaggaaaaaattcacatgtaatgtaaatatatacagatatgcagtataggaaaacagctatgtcctaatgttaaaacaatgtttttgaaaacaaagtagattcaaaatcatttgaatctactttgaaatctaggcactgtggtaggttattacaaatagaaatgtttacatttataaaaattacattccaattataacaaatggaaattaaaacattaattttcaaaatatacagtagattataagtaacttattattatgaaaggggaagatacaagtatcatattatttcttcatcaacttggaaaataacctcacttccttatctgcctggttcacatattccttaccttcttcatgctctatttgttggatatagcaaggtttgctatattgttttctcttggtttatttgctacacagttttttgtattcccaagggcaaaataaataaaataaaatagacctcggccctaaactacacaaccaacaacaaaaatccaggcaacacaacaatgactttttgtgaccaagctggaaaatcatttgcctgtttccatctaagtggtttattcttcaaaagttactgaccagaaaaagggggcatgtattttaaaaagctgatcctagtgcaaacattactccatttacctctgacacataaagcaaacatgatttaatcagtatcgaaaacaatgaagcaaaaaaaatctgcccactgaaaaatcaataatgcaaaaaagtatatagtgtttgtctaacccaaaaacaatgagacaaaaatgggccatatttaattcatctcagttggtagtggagacccatatttgacaccctgcacttactggcactgtcctcaagttgacctgtgactatgactactctcccccatagcccccaggactgctccagttcatctggtaccccacagttttcttacataacaaccacacatcacaacccccaaaagtttcttccctaatgatataccctctctatattctatgttaccttgttttaagccttaaggagttagtggtatcactatttgtcccatttactagctgacacacactgaagttgtccatagagggtaggacaccaaggctggttagggagaataaaggctcagacttctggagcataaaatacagggaagttcttctatgcccagattatttttggttttactgcaaatgttctacatttcagcactaggttatagatttggtccagtaatcttttcacaggcctttatccgattgatctcaattggtcttttctctgagaaccaggtcaatgacttcagatgaaagcagataacttccttgtcaactgatttccttttatggtgtgataatggaaaaattagggagtgtgcctcatagattccctctcctcagtgactctttgtcagacagctggctgtcatctggggtgacagggtaaatgggccacaagcctgtcatcatctggcagccaaggcagggctttctcacaaggcagtggcagatttccaagaaagaaagcagaagcatgcaaagacacttgaggcccgaaccgtcaggatgttacttttaccttattctactggccaaagcaaggcacgaggcttaaccatgtttggaagtggtggggaataaacagactctccttttgatgagtagaactaattatacagttagctgcaaaggacctgcacagagggaaaggtgaagagttgtgatttttgcaatctcctatggctgccaaactatatattctctcttagtatagatgatatatgatctgataagaagtatcagtttttatatattagtagcatttattcaacgtgatgtaataggaataacatgcaactggacatcaggatatccaggtttcagttttgtcttttccactagaccagatacagtagcttcctattattggtggaataaattatctcaaactcagtggcttaaaacaacatgaatttttattatcttatagttctggaaatcagaggctctaaatgagtttcactaggctaaaatcaggcctgtgtttcttatggagattctaggaaaaaaaaaaacatttccttgattttcccagcttttagaggcaacctacaatctttttttttttttttttttctgagatggagttttgctcttgttgcccaggctggagtgcaatggtgcaatctcggctcaccacaacctccgcctcctgggttcaaatgattctcctgcctcagcctcccgagtagctgtgattacaagcatgcagcaccacccccagctaattttgtatttttaatagagacagggtttctccatgttggtcaggctggtttcaaactcccaacctcaggtgatctgcccgccttggcctcccaaagtgctgggattacaggcgtgagccaccgcacccatcgtacattctttagctcatggctccttccttcattttcaaagccagcagagcagtgtttccttggacctctgcttatgtccttacatgttttctctctgactcttaccctcctgccttcctttataaggaccgtagattacattgggcattcttggataatccaggataatctccccatctcaaaatccttaaccacatctgcaaaattccttttaccaagtaaggtaacattcacaagtttggaggattagaacttggatattgttggcgtgggcataatatgacctgctctaccagagttcagcaatctatagcctgggggtcagccacatgtttatgtaaatagagttttattagagcacaccaatgttaattctttacatattttctgtggttgctttcctgctacagcagcagagttgagttacaatagagctcatatggcctgcaaagcctaaaatatttactatctcatcctttatagataaagattgctgaccttgtaactagatttactgtcaccttggacaaattagtctcactaagcataatagaatcataactttatagactgggaaagaaccttaaaagtaattttggttaaactctaccctatacatttctctgcgtaaatcaccttttcagaaaaactggtgaatggccattcagcttctgctccaaaacatggaactaaaaggagctcactgtctcatgaagtagctcatgtttatttcaaacagctgtaattcttcaacaaatagaaatatattatttatattgaccaaaaagttgcagtcttttgactttcttgcctagtcttatttatgccttctgagaccatagagaataagtgaaatctctcttctatctgtgagcactttaaaaatttgattctgctatcatatctgaaagttatttagttatttgcataaatatgtggagtgtcaacaaaggagaaagagacagtgttctcagatcagaaccttgctgagcaagctgcctggacttagctgtcactattgcatggatgcaagggagtcactgcccctggtccagcttttatgagtttctctatttgtgcctgggaaattcaccaaagagggtggggttgcacactgttaacgtctccctttcagatgaggcactcgtatttccttgttcaataagccatgtaaatatggctttcagttcacacagcgtggatgcccaagcctcaaatccctctcctataattctgattccatctccaagagaattcagatgctgttagtagtctgtaactaaagcgaaactaagaagctcaatgaaaccacagctcctctgttaatcggggaaaaccaaactcctctagagggcactgtagcactcaccgaattctgtgaactgagaacactggtttaagagaatctgaacagataccagctcttaaagaaaactgtccattccctgggagtgaggttagccagggggacagagttaagccaataaaaaggggctcaaaagagctaacttgttactagagctacaaaccatgtttggattaatctccggtgtcctatcctaagtctaaagcttccctggtgctttattcactattaattcctgtatccgacaatatttactgaatccttactgtgtgctagcctttgtgttagggactgatggaaaaaactaagacaaaaacaaacaaaaaaactctgccgaatttctccaatttgccttgaagtctcattctcttttgtttattaataatccttatctaaaatcccttagcaattggagatctctttctccttcgttctttatgttgaatgatgtcttcatcatccccattagcaagttagaagaccgggagtaactttatacctatcctcccttctcttttcaattcggcctcccattctaccaattttacttaacatttctcaggtctatcctactcatttccattgctccttgccactgccccaaggtagcattatcttacttctgctcacctttccaggtttatctatcaccatttctcattatgaatttacatccaggagtactgaggtgcttgcaatttcataccctcttctgctttttcttttttttctctatttttgcccctccccgacttccctggcttatttctactcatcttttaacgttcagcccaagcatctcctccaagacttctacttaaaattacccttcccatcccttcttctgctaccagactagttaagttgccccttttctggacctttagagtctggatacatctttattaatgctgtttccgttttttcttgcatacgagattgtgagctccttgaggaccggggcaattctataagattcatctctacatccttgatgtttattccagtcctggaacatagctggccctcaatgaatgttatttatgtcaatcaatatttaaatcaatttgatagtacccatgagctgaggccccatagagaggaggggtgtacaaagagaaatgtcaataaattgacctatatatcttgggatatatctctgggcctcctacagcagttctccctcagatgatgaattttctgacaatgatgtgcattactgaaacatattcctttcattaatagttaggtttcaacagtaataattaggataaccatttctctcactgtttccacaactggaagaaattcctaagaaaggaaggtatatgaaatttgtgatgtaggagacagaggccaacttctttcccattgtaaccagcaaatactgagttatgtaagggtccaaagagaactatcatagcaaagtgctggcagagattagtgatgctttactcctgttttgtttaccataatgaactggtcaataaacatcacaaattgtttatctatataaatcttgacagattactctttatgaaatccatttagcaagcgaggttttcccataaggatgaaaaatgaagattttaaacagattgcgggagaagctctggctgtaccaagagagtcagtgtaataaaggtttctttatattaatattacaaaaaccatttatcctggcaaaatcaatattgcaattcatcttagtttggtgtttctctttctaagcttaaaatgtcttttcctttattatgtataattttgttttaataaatgtgaaatatatttcatttaggaggtactcttgaggagggataacttataaaatgacatcaaatttgtagcttatttgctaaagagtcttggaagtgtttaaaattatatttgagtggctgagaaatctaaaggaatcattttgcttaatccttaattacaaaattatccctgtgtcctttggggtaaaaacaaactacaattttcagaaaagtcttcgcttgtgaacttcatttaggaaaaattctctcttactgaagtcaagtgattataacaagtcagataagttgactataacaatggcttggataagagactataaaatcaagaatagacacatttaattgctcaaaacattgcgtgctttggctggaagaaaatagaactacatcaaggaacggaattatgttatacattggaagctattactctaaatgtactgtatgtaaaataagtgtgattgtctcatgagtgaatggtaataaaaactgaaatactcaagagacacttattcatgagtggtgcagttacacatacatatatacacacacacacacacacacatacattgagagaagcttttctcttattgtttatgctcactaatattatattaaaagcctataaacaatagactctacataatagcctataaagaaattaagagcaaatcaagtatttttgcatctataattccattttaattataatacataattttcttcagctctaaaacttaacctaaacaaaacatctatttgaaatggaattctgatgtaatgtgtatagataaaagacctaatatagttgtttgaagggggaaaatgtccttttatcatgaccataaaaacggcaaactacagtacagtggttttcaagaaaaactgtactttatttattcccaaggggatattagtccataaaacaaatttgcagcttatttggcagtcttagcttttatcagcctttttaagggtgttgaatgattacccaagagatcacactgtaaaaatggcagtggggaaaagtaactccatccgttcagcatctttattagaatatataggtgaatccatttgatgttgttttaaacgtaccacaaggagagtaccttttaaatggtgagtggtcttcttacatgtgctgttttgcttctctaatacctcatggcaccaacgttgcttatcctaattagtgccattggcataggctacatgtttgaataattcactgtgaagaaacaagttttagtttctatcatggcaaaatgccactactggtatttttacaagcaactttgggtccaagaaatttaagttgcactaaagttatcttactatatttatgtcattagcatcttttcataaatcagaataatgctgtattctccaaccattatggataactaagtttagttcataaaacagaaaatgaaatataacccatattaaggcatcaaaaatatttgaacctgtctttctcaagcaattttcttagtgaaatttagtcttcatcgaactaactatagaattttaagatttttagggagagcaatgatttacccctgattttctatttcgcaattggagagtcacttgaaaagataattttatgggtacctaatctaaatgtttagctgacaggaacactgcttttgtaaaagcaaaatttacagcattcttaattgaacaactggattcaaactaatccataagatatattgtgggatgtaaaaaagcaatataatatctttttttgctattaattagtttataaagagaaagctttatacgggttttaccaggaacagtagttttataaagatcttttctattttcctttattttatgttgattctttgtttgtttagctcaagcattcttttcaatatattggctaaaacaagccgtcttactctacaatgctattggtaggtgtaacttatactatgaattattaatcaaaacactattctctttgatggtttatttgccttgttttcagatgtcagccttgtaattgtcatctctcaggagccttgaatgaaacctgtcacttggtcacaggccagtgtttctgtaaacaatttgtcactggctcaaagtgtgatgcttgtgttcccagtgcaagccacttggatgtcaacaatctattgggttgcagcaaaagtaagtgaactctggttcagtgctggtgtgtgaagcagcatcatacaggggactgcatctcattgttttctttctccatttagaacccatcagaaaggcttagtacaatgtgaagaacgtaggtaagagatggaaaaaaatacactgaatgaaatatgtctgcttttccttgattagacaattggaaatggtaatataattatgttcatggtgggaaatttacaatagttttttggagtgaaatcaacaatgaggtgattaaagtcctaggttttcccagaccaagggtcttcccaggacacaagacttttaatggtaaaatcaggactatattggttaaaccaaaacagttggtcaccgacacaaagacatttccaggtaagttatttttttttgacaaataaagggtgaattcttgtttattatatgtttgatattcttccatcccccaaattttgtgggcagtattataccattagttgtttatcgatattgtaataattagtatcattcgtcacgcatattattcatcccataattcatgtttctttctactttaagtttcactcatttaaatatctctcacatttatatttttaattccttaaagcctaagattacatgtaagtatcttttgacttttcaacatcgcttttcagtaccttgaattgacctcacaaggtcacctgcagttctacaatttcataacatattgaccgttttcctatatttacttcaagatcatacatccttaccctttccagaatccctaagaaatgcctgctgggaacatgtggtaggagccctctacaacatattgtgctatgcatattctccttggggtgtcctgagactgtcatgagtcacaatgataggaaacgccacaagtcatgacagatcatcacaaaccagcatgcctggaactctgctatctacatttaaggggggagggagaaagataagtaatgggatattggactccacaacaactgtactagattttgaggtaatggaaagcaggatatagctagtgattaagaagacgtattcatattttgtacctgtgtagtttctcttcagcatcccgcatttcatcagtccctctggatttcagtataagtaaaactgtaggtatttatgcttcttttgggaaagaactgtcataattcctttcatgtataaatacagtctaaacataaatctggacttcattggccacttaattactatgtgtcatttattgattagcaatacaattgattgctttgtatgcaacaaaaattctagcatattccttttggatatgagttatggatcgtcatttataatggaattacaatacctaatcttagtgatttctgattggttctgccactaattttgtgacaatattggcacctgctctactttttgctacctattccttcttgcatttgagacatagtctgggaattatctctcaggcaaaactggatagtcatgtcactggaaagctagcctacaactcttagtagtggtagacatttaattttatgttttattaactggacattctttccaagtgtttctgatttgttagaatttttaaaaactctcacattcctaatgattcttccctggacatattccttttggttttttatctctttaaaattatgatatatcatactgagcacagttcttcaactcttgtggttgttgctgcttctgttttaggtttttatttaacaaaatttttgaaacactgtgtaaagttggaagctcagcatcagcagaggcaatttattagaaacaaatgagacaactttcctgccttcagaggaggtcaaaacatagctagagtgatggacactgataataggaggggagcagaaaaatgtaaatggtgggatgaggatgaagggtcccagccttctctcctgttccagcttgattttcacatggtacttgtgtttgatcctagcagaagccagccagaacaattggcttcacaaagatatgatgaaattgaaaggaatgtagtgctatctattgctgacacagtgaactacctctgactagtatttgtctctgtatccaacagatgtcaagaaatattttcatttaaaattaaaatttctcatggtaccccaccccctacacagtttgggaactgcaggattataaccctcattatatcttctaggggccactagcaataatttagtaatatcatctgtgatttttatttttggtgggctgtcagggtgggaatcctaggatgtaatttccaaaatgcaagaggattgaatgaaaataaagtagttagaccttttcttatagtaaatttcccttttgggtgattcacttctttcctttaaatattggtatcatgctttcaaaatgatagtcattcttcttgataggaagcaaaacaagaattaacataaattaaatagtcctattttctgtatgctttcctagcgaatgatattctagttagttcaaccatctatgaacctaactaaaattatacacatacacacacacacgtatacaattagccacttattgtttgatagtgtttgtcttcttgacactattctcattgttatttattcatctttatatccacattttttctttatctctccttgccagagagcctcttctagctctccttttattaacagctttattaaagtataatttacatattatatatttaacaattttaagtatatggtttgatggattttagtaaatttagacttgtgcaatcattactataatccaattgtagaacacttctgtcatttcaaaaagttcctttgtgcccatttccagtcaatcatgactcccacctctagccccaaacaactagttatagggtctttgatgagataattttgcctttcccatgagttttatataaatgaaattatacaacatttagactttttgcaatgtataggcttttgtatctagcttcatcttaacaaaatgtttttgaggttcagtcatattgttgcatgtctcagtagattcttttaattgctgagtagtattttatggatacactatattttgtttatccattgatcagttgacatttagattgttttcagcattggtctactatgaataatgcatccatgaacatacagttacaagtctctgtgtggacatgcatctttatatctctttatatcctgagaataaaaaggctggtttgtataccaaatatatttttaatgttttaggaaactgccaaattattttccaacatggctgtattattttacatttacattagcaacttataagagatccagttactctatggtctcagcaacatttggcattgactctatttcattatagccattcagtgagtgtgtagtagtatcttgttgtgattttagtttgcatttttcctgctgactaatgttgaacaacttttcatgtgtattgtcattcatgtgatttttggcaaagtatctttgaaatattttgcccgtgttttagttgttagtcctcttactgagttaaagaattccttattaatttgggataaaacttgcaaatagtcctctcattctgtggatttgtttttcattttttttattggtatactttaaaaagcaaaagcttttacttttcatgaagtcaatttaccaagcttttcctttatgggtcatgtttttgtgtcctatctaagaaattttggattgactcaatgtgaaaaaaaaaaattctccatttttatcttacagttttatacttaaacatttacatttagatccatgaaataatttgaattagttttgtacatggtatgagttaagcatctaagttctttatttcatttttattttttgacacataggtatccaaatgttccattaacatttgttgaaattgccatcctttccccattgaattacccaagcatctatgcaaaaatgcagttgaccccatagctaacatcatattcaataatgaaagactgagatctaagatcagacataatacagaaatgcccacatattagccagagcaggtaatcaagaaaaagtaagtaaaagtctcccaaattagaaagttgattttctttacttgtagatgatatgattctatatgtggaaaatccaaacaaattcacaagaaagctactagagctagtaaacaaattcagcaatgttctatgttacaagatcaacacacaaaattagttgtgtttctataagccagcaatgaataatttgaaaaagaaattaataaagcaatttcacttataatgcatcaaaaatttaaccaaggagatgaagacttgtacattatctgttttctgtgtttccaggaaacctatagtataattgcgcaatgttatttctatgcactgttccttttatgcttagccatgtgctctccagtgtctcatgagtttcatgcaggatctgtgtgtgatcacttttctattaggatgctaagatagaagtaattttcccattagtatatattatctgtggtaataaatatattacttattgccaaataagccatttataattcttgggatgtaagaatcaaggatgccttccagcacactggagggtagaggaaataaaggtgatatttattgaacaattactttatacacatatacacacacacacacccctacatacatatgtgcatgcacacacacacacacacacacaaacacacacacaccttatcttcaaaataaccctgacggggagacattatcattctcttaatataaatgagaaaaggttcagagagtccaatcaatatttgactataatcatacaactaccaaagttccaaagctggagattcaagctggtggttcccaaagagatggatctagtcacaatattatactctcatcccataaaagagagtctggcatatgcaaagaccattcttggcaattttgatgagtgaatatgtgaacattttttaggaattctacttcaagcacataaaggttcaagttctctcatgctcaagatttaataatattattctcaaaagtgttggtaagtcatctaaaccttctggcttatgaaaatttcaacttaaataccaaagaggtactatttatttatgctgtggagtcagacaagattgtggttgacatggtcatagcaagtaatcagcttaaatgtttggaaagagcctctgtgtgtgaagaacttttgttgccaaggatattttcatgtaatgcaaatcattttctacaccctttgacatgggagtgaaacatctatctctctttcattttcattcatccccaaagcattttgctgccttagaaaatcatctgaaggtcagttttgattgctctaactctgaaatctgttgtgttcctgatagcatgcagagttttagatgaaatcactaatattcactaaaaaatgttaaattaccatgaattgcaaggttctttgagagtgctgtaaatgaggcagttgatgatatttgtggctccaccaagaacaacaggatttaaaaccctaaattaaaatccactgaaagggtcaaatgcattttcagtgttcaaccgatcaaagtgaccatatcaaatatggaaaattcatgaattcaaaaatgtaaggtgttattcggaaataattcttttctcatgtgtcattatgagattgttgctactcttttcctatgtctaaataggcatatagactgttggaatgttaatagaacaatgcaaattccaaagaagaaaaagacaaaaggagggcaatgagcatgtatctagtttgaatattttaaaacatatgatgtaaatattatctgccttaggatcagactttgtctttaggaagcctattcatagtacatggaattttatatattttacattcagtgctgtgcagaataaaacaacattttccccctctgttctcacaccaccatcaacatagttgaacaagcaattctgcagcattaatatcctacaatccagttcaactcttgcgctatatacctggaagtagtggcagattccacgggtgaggggtcagtccccaaggctgcccccaacttctaacaccaatcacaagctccaggttattttgcctgtgcttgtaacccactggctataaattggggctcctatgactccctccttgggttcaattactttggcagctcagctcaaaataaggaagcacttatttttactgatttatgatacaggatattgcaaagatacagatgaagcaatgcataggacaagatacgtggaaaggggagctgagcttccatgtcctccctaggtgtcacaccctccaggaacttccacgtgttaaactacatggagctctccctgtacccccaccaccccccaccaccccaaacaccctttttgttgttgttgttttagacagagtctcgctctgtcgccaggctggaatgcagtggcgatcttggctcactgcaacttccgactcccgggttcaaacgattcttccgcctgagcctgccgagtagctgggattacaggtgtgtgccaccatgcccagctaatttttgtatttttagtagagacggggtttcaccatgttggccaggatggtcttgatctcctgacctcgtgatccgcccgcctcgaccctttatagcaacttcattggataggcatgactgaagcatggatgtggcagactaccacaattactacttgagaccatcactacaacagttactactgttactatttgagactgtcattacaagactgaatgaaggaggatgaacgcagaaatgaaaacttaaaacaaaaataactattttacaggaagggtaacatggggaagaagaagaggggtccctgcttcttgtgagcaagggcagctgcctgagctgcttcagcccttcatatttattgggtagaaagagcagggaggaggagggcatgattggtcagctgcttgattgatcacagggtcatattattactaacaggcttcagatttgcctaataacaagaaacacttgtgcctgggtcatgactgccctcagcattccttccgggtgcagacgcagtttgtcagcttgccaacatcctgctttcatgagaacagtttgctgtttactcatatagcctccagtggtatacttagttgatcacgaccctcattcttttggccttcaacacatggacaactatgtagaaatgtgatttaaaaaaaaaaaggagtatgatttcatactaatcgactgagtggggaaaccctgcaaggctgcctattcagagtcttcttggcctctctctgcagtattcattcctccagggcatggggcaggactccttctaaaatgagggtctcatgacccacagtcagacaaggtaggtcagagaatttccttatggccggctctaagacagaaaggtggaggaacattagagtatatttttagtttccctggcctgccttggggagaaaaaggaacaggtagaagcagaacagaacagagacagaccctattttctgaggcctacttctgaagcctaaatctccccaatattgtaacaaaagactgtccttcacctgtatcactcttaaattgttctgaagctgcttcaggacccttggataaaagaccaatacttcaacaaaagataggcttattgtgttagtcaccaaggaaatagcaaaggctatggaagttatgagccaggaaccatggacaaaaacgtgtgtgtgtgtgtatggtgtataaatatcaaagtgctcttgaaatcctgtcttaaaatgtaataatttgattatattatatcttttagacagagttcatatattatatctattaaaaagagttcatcactcatgggtcctggtgaattagcaatagctctggggtggaagtctttgcttagtttgcagaataacttcactttactgttccctacttttccactttgctctgtcctccaagattctatgtggtttgcatcagcagcctccattgccctctggccatcagttagttgatttcagctgctaagagggacccaccaaacatctggagggcaggtggaaaaggaagtcaggatatttaattccccgctccctgtgtccatgtagaagcagcctcaagctaactgcatccctccatgagtggtcatagctcctgtcaggtgatgctcttcatacagtcatttctgtccctgagttctgtccccatttaagctagagatagtgtgcagagaagagttaacatagcaagcctgactgcttatttttagaaagacctgcttacaaagttggcctttggctgacatctggatccccactatccccagaactgataagagaggaccactgcacttaaacatttgtacaaagtacggtttatgcttaacacctgctttccttgtgggggtcttaaatttgggtaaatgccagatagaggctgctcataggaacagcccccaataaaaaccctgtgcactgagtttctaaggagcttccctgattggcaacacatcacacatattttcataatgcattgctgggggaattaggcccattctatctctactggaagagaattcttggaagcttgtgcttggtttcccctggacttcattgatatgccttttccctttgttgatgaattctgtaacatttcactgtaataaattttagccatgagtaggactatatgatgagtcctgagtcttcctagtgaatcattagacccagggttcagggttggcttgagaaaccctgacataaatagcaaaagagctctgcagttctgtacctgagagtactggaccatctcttttgcccacccttttgaaagtggttcctttattgagctctccccaagttactttttttgagtgtgctttcttttactgaggcttctagtgactgtagatatttcatataaaaatattaattatttgatggattcttttctgtaccttacatttacatatttcttaacaaaaagatgaatggtttaaaagtaaggtaacacagcaacctgtacccttgacatcttatttaaggagaatgtttgattaggttgtgcttctttaaatggatgggggattgtgcatcttgtttaaactagaaaatagtacgtaaactggtggttgattgtccctaaaaatatttagctgttgtttttctcctttatctttgcgtattctggtgaaaaaaaagaaaattcactctcaaaagcagggagactaagaaaaatttacagtgacagaacacaatgttttcatggtatatatttatattatagaaaacatcacttaagtagtgagatgaatgttcttatttcttatgtgcctgataagcaattgtattacatcttaaaaacacctctaacaggtgatggtacattcatatagtatattcaaatcgtttcttgataatatttagattatttaacatccatagctatttatatcaccaaatattattctttcttttacactgtgctctctgaagcaagataaagcattgtgcttaatggaatggaaagcttcctctcaaaaacccaaagattatgctacttaaatttcaagtttcaatggaacttatgtcaacttttaaattaactatgtaaaaaataaatgttgtgcatccttggatggtttctcaaaaaaaaaaaaaaaaaaggcaaagaaagaaatgcttaatgtaaactatggtggttttttacccccaactatatttatgccagctgctttgacctaaaaagtttttttatgcttatagataaaaagctttgttttagagaactcatgaaccctttgtttattaatgtcttggtaaaccacatgtcttcttgataaagcaatcctgaatcagaaagacctctttgctggatatcttacttcagtttgcttttctgtttattgattgctttgctaataaatgctctcttcattgtaatttagctccattccagcaacctccgcccagaggacaagttcaaagttcttctgctatcaatctctcctggagtccacctgattctccaaatgcccactggcttacttacagtttactcagggatggttttgaaatctacacaacagaggatcaatacccatacagtgagtttaagggtttggtaatagaaataaatattctgagaattgacacattagttaagttctttgacattgaggataaatgctgttgtggtttcctctgtctggcacagagtgtttcaaacagagataaaattacaaatttcactagtaatcaaagaaatacaataaaaatgagatgcttattatctgataaatactaatgcttatcacattctcaaagatgaaaaaaaaatgaccccatcaagaattgatgggaatgtggggaagctggaacttttataaactgctgaggtgtctgtgtgagttcattagtacaacttttcatgtacaataatttgttaaaatctatgaaaaaatctttccttttaacataacatttgacttagcaaacttattttaggaagtttatctcaagtgaacagtcattaagtagacacacaagatgtccatacctattctatttgtaacatcaaaatattgaaaatgattcagatgttcaacaatgtttcaggaaattatagtatatggcataacagaatcctggtacattgttaaataaattataggctatgatagcatataaactgataccttagttcacatatcaataaatggaaaatgttcatgacatattgtttaaggcaggggtccccaatccccaggctgtggacaggtactggtctgtgacctgttaggaacaggaccacacagcaggaggtgagcagcaggccggcgacattactgcctgagccctgcctcctgtcagttctgtggcggcatgagattctcataggaacaggaatcctattgcgaactgtgcatgcgagggatctaggttgcacgctccttatgataatctaataataaatataatgcgcttgaatcatgccaaaaccatccctcctcaccttcccatcctgggtccatggaaaaactgttttccatgaaaccagtccctggggccaaaaaagttggggaccactggtttaaagtaaataaagttattaaaataatctgagaattataccattttaatttacaaatactggaagacataataaatagatctagttttctctaattgtaaatattatagaaaatgtatcaaatatttctattataatgaattcaagttttttaattctcaggttaaagaactattaaatctggcagtggagtactaacactcaagcaaatagtgtaatttaatacacacattgctgtttccgcagagatagaacacagcaacataaacttttgaaagagaaaggatataaacaagccatcaagcctatctttgcctttgtaacttttatgaagattttaaaggagcttatagaaatcaaattattagaattcattgactttaaaaaacatttactcagatgttttagatacagtttccctaaagacagaatgaaaaaaataggaatttttacattattccagctctatcttctctgatttttgcttctagccatgtttagctacacactagtttaagaaacctcggaacagcaattccaattcaagtttctattttgttctcttcatttaatacacagttttccaaattctactttaaccatgcttaattagttggagaactgtttaaagctctgtcgaaacactgaaattccataaccttccttaaaatggttaggaggatgccttgttttaacattttaattgactttaaaactcctgcatcgcatagagttttattttgtatgcattatactgggtttcattttgcacctaattcatataactggaatttagtttcttatgtccacccctttctcttggctctacatgtctcttcagtattccaagtcttctttaaagttaatggaaactctgaacttcatgatgcagattgcaaagggaaatgaacatctgtctacatctgccatgttggcaaagtatcctgaaaacctgctactagaatgtttattttcttccaaatatcagcatgatccaggtgtcctgaaacttaaacttttgtgacagagaaagagaggagttataaaaatattgaaaatgattttgaagatgacagtaccactgattatttctgaagttgtgaattagggtcaccctactttccatacagcttaatgcaatagcaaaattaaacttaaaactatcaatgatattattcaagccagaggcatgatttccatagtaacatattgtgatctattttatagaacatcacatgttagtacaacattggctgtttttgacgattgcactaataaggaatccaaataacattttcttacataataaatgtgtattcattcactaatcagacatttatataatcctattaaacaaggtatcatttcctaaaaccatatttttcattaaaaaatgccacttctggcatttcttgacaatcactgtaattaatgatgtgaaaattatctgcatgatggcatttgaacagtaagaacaattggttaacactgtcagaactttgtatcattctaacaatagcctcatgtttattactctatttctagtgcgtggctagcatgtgtaacatgtaaaggaaacactacttatattcagctggatgaacacaaatctttgggttaaataaaggcattaggaattataggtggagaatcattgaacttttcaaagaaaattaatagtgttgtcttccaagcaagtttgatagtttgtttgagacctttatagaattcttttttagaatggaaactttttctagctggcctaatgtactatgggattctctaagacatattttccttcttaggatcatgatatactggtgtaccatctttaaagctttcaaattatttgttattataatagcatgcaaataatgaataattttaaagattgtgaataattaactttaaaaaacaaggtatatctttacgttttatttaaggtagaggtcaagctagcgcttcgagaatcatacataatcagccctaacagtatctctattgtagcccccttctgggttgctcataggtatcttacgtgtcataggaaggaagtgaacagttattggaggaaatagcactcttctgttagtgttgcaggtttagggagtggacagtaactcatactgttttttggtgttgttcctatttgagtttggaatcaaaggagcactagacatagtaggcagatcaaatttaaaaataaaaacgatcttcattactgatgaaagtcagattagagactatatcctttttcctgcaggaagacaaattagaagagagaaaaatcaatgggctgatctgcacataatttgctccctacaccctgactccccagattcacagtcagatgagttgttcctcatttgggatggcatgaatggggagatagcccttaaatgtcactttagagaaatccttccacaggaactagaggatgattatttttacatgtaacaatgacttctatcacctacagatattatcgtagtttaagcttagaattttagacaaccaaatattttaatgagccctgggatttcatttctacccttattcatttccatctttaaaattataatttataatctcatactacatcaagggatcaatgtaacaagtggtaagatgattcagttagctctgagaggaataaatgaagaaatataagatatagagacaggatgagaaaacagaagagaagatgacaggcaactgtttttataaggctcttaatattcttaatgcggtagtttccccttatccatggttttgttttctgcagtttgttactcatggtcaacaatgttccaaaaataggtgagtctacagtacaataagatgttttgagagagagagaaagaccatattcacataactattattggggtatattgttataattgttctattttattttcagttattgttgttaatctcttactctgcctaacataaattaaactttatcatagatatgtatgtataggaaaaagaacagtatatatacacacatatatatgtatgtatatatatgtgtatatgtgtatatatatacatatatgtatgtgtgtgtatatatatatagtttaatactatttgttgttttaggaatccactggagatcttggaatgtatctcctgtggataagaggggactactatattctttcctggaacaatagatcaaatatgtatagaaaaatcattcatgtgtttaataaaattttgttcagtgcttattccagaccagaaactgtatcagtcattagaaatacaaagatgaaaggaatagttctccttactgagtggggagacatataagtaaaccaaagtaacaatagaatatataaatgttgaagcagagtaaacttggggtgttaaggaagcacacggtggcttgggaggtgtaggaaatgtaaccatgcctgtggtggcaatgatgtgatggagaaccactgaaagtttcccagtaaagaaagaatataagctgaattagccagatactgtagttgaggaagcgtgatggtcatgaaataaattttgtattaaaagaaaataaggtatattcagcaatcatgggcagttccatgtagctttggtaagtggtacaatgggggagtgctacaaaccaggagggtatcagccaagatcacaaatcagtgctgagccaaggactgtaaatgtttctctgaaaatgcagaagtctgtagtaacagcaaattttcaaattcagtgttaaagatccgtaccccaaccaaggagagcaactaccttgagataagcactcttttaacctgagtattatttttttgttatggatcattaatggatatcctattcataccctttcaaatgcttttatatctttcacactataaattgccttatatgatattcctacacaaatgcatatttccatcccaattctatctgattctaatttcttattaagtagactgctcttgtataatacattctgatctattaggattatattccacttttcagatgctacaaacattcagcaagtactgtacttcttttaattgtcatcaggttataagtcttccaacttccagtttaagcttatgccagacaatcttttggaatattcagcactgaaatttatttttttcttttaggttttggcttttggcatgctaaattattttccatcgttgttctagccttcagtgatttttcaaattttgttaatgttttcaacaaccttattgtgggataagggtaactttaatctaatctagtaaatatttattgaaataacaatgagccacagctgcacgctctctagaaagtctgaatctcagccctaggggacttttccaaatatgatccttctttgggtgctctgccttagcactaaggatggtgactttcccctgtctcttctattcctatattctttagagttttctgtaccacttagaaagtaaaaccaggcgacctctggtacccatggtacaactgaaaacagccaccagagagagaactgtctcaccttcctcggctctatcagggtcatctctgataagacagtggccctcacctgagtcagtgcccaaggtgccccccacaacaccagcggaggcctcctccactgagcagtcggaccccagagtgctctgtaggagctgtagactgggaagaagggccgggtgtggtggctcatggctgtcatcccaacactttgggaagctgaggtgggcggattgcttgagcccaggggttcaagaccaacctaggcaaaatggtgcaaccctatctctacaaaaaatacaaaaattagccgggcgtggtggtgggcacctgtagtcccagctattctatttgggagactgaggcaggagaatcgcttgaacccgggaggcagaagttgcagtgagccgagattgtgccactgcactccagcctgggtgacaaagtcagaccctgtcttcaaaaaaaaaaaaaaaagaaaaaagactgggaatgcctaggtttacacgatgggttatcactccaaagatttgtgtcttttgtggccaatggcagatccaggaaagaaatgaaagttgccgatggggataggctgggggagagcaatacagatgtgtatgggaaaccccaacccatatatattgtaaatagatggactaggctaaacattgttgctgtttcagtcttctgcaaactcagcttttccacaataaagctctatctcctgtcggaaggaaggaaggaaggaaggaaggaaggaaggaaggaaggaagggagggagggagggagggagggagggagggagggatggatggggggaggggaaggggaaggggaagcacataaatatgctgggaccttcatattgctatagggcacccctgcttaatggaaccctcctcgcatctccaatgcaaacagccccatggcggagcaggcagcagccactctggtatttgtgtgtttcgcagtcctacagtgtgtttcctgtccttagagaacaaggatttccagccatgtgcctaatcacctccactccctatcttattttttaaaaacctctttgtagctgcttctctttgccctcacaatccttcatgcatagaagtcctgcttatctaaaacttctgttgtgtaaattcctcattgctgataacaaatgtctccaaaatttagcagcttaaaacaataaacatttataatttctgtaggtcagaaaataagaaaattttccattcaagatgttggccaggtgacagatttaccccttggtggtagtttactgacccttagtctggtgtgtttagtgtttaacaagcaaacaagttacatagaggaaacatagttacttttctgttttggagaaccgcaaggactttctcttagaccttctaacaaaaggacactatgaaaagcaaaagaagaactaaaacaaacatctaaacattctttattatgaatgatactttcttatactcaataataaaagcaatcaaccggtatttacattatttcaattttaaaaatatgaaatgtatccttaatcaaaagagtagattggtatagtttatgtaattaaataatatgataggaaagcagttagcaatgattcttcaccaacttgtgaaatgtaactttgttttttttttttcttttcatttcaggtattcaatacttcttagacacagacctgttaccatataccaaatattcctattacattgagaccaccaatgtgcatggttcaacaaggagtgtagctgtcacttacaagacaaaaccaggggtcccagagggaaacttgactttaagttatatcattcctattggctcagactctgtgacacttacctggacaacactctcaaatcaatctggtcccatagagaaatatattttgtcctgtgcccctttggctggtggtcagccatgtgtttcctacgaaggtcatgaaacctcagctaccatctggaatctggttccatttgccaagtacgatttttctgtacaggcgtgtactagcgggggctgtttacacagcttgcccattacagtgaccacagcccaggcccctccccaaagactaagtccacctaagatgcagaaaatcagttctacagaacttcatgtagaatggtctccaccagcggaactaaatggtaagaatccaaggctgagattcccctttttggtcaagacatgaatgagaatctattgtaattgtgcaattaggaatttggcagttgtattcctttttataactgcacaatataataattgagaaacagtttctaaagatataagatagtatttgtcctggttagtggaacaagtgtatttcttctaatctaataacaaattccattcaattaaattgccccttaaaaggctaatattatctttgctcttaatgacatctgccataacacaaatgatgtttataatttgaaactcacttatgaaatgcattatatttgactgtgtcacaagttagggcacccacaagcagtacatttttctcttctaagcaagaaaaagatataaaatgatacaaaaaatatgtatataagctaactgactccattaagttaatttttgcattcatgcatttgaacccttggttatataggccagacacacattcacagatttttaatcatttatatcatgtacatattatagcaaaatctttctttagatttgtaaagttatttggtaaaactgggtagagattgactataacatttatgcaaacagggcttatgttaaacaagttaaattaaaacctccaaatttgaaaggatacagactggagctataatgatcaaattccccaaaagaactggccattcttaacagaaattgtgaatatcaattctgaaaaagattgaatttacctatgataaagtgtagttattttttgtctatgtgttatccattttggtttgttttcctcatgagtatgcctttaatagtattttatacattcatctatatagcagtttgttgtcttctatgtacctgtcatctagattactaaactactaaatcactacattttgaatgctaaagaaattgacagtaatctaattagaaagacaatgaatatccagcactctttaactgacctgtccctaccctacccctaaagtaacccctttgtctgatgagttacgtaggttcactatttaatttctctaggaataattataagatatgaactatacatgagaagactgagatctactaaagaaaccacatctgaggaaagtcgagtttttcagagcagtggttggctcagtcctcattcatttgtagaatcggccaatgaaaatgcattaaaacctcctcaaacaatgacaaccatcactggcttggagccatacaccaagtatgagttcagagtcttagctgtgaatatggctggaagtgtgtcttctgcctgggtctcagaaagaacgggagaatcaggtaaagatcaatgttttaaattctacttttaaaacctctgaatgcaaatgtttcctcaaattaaagtcaaagtactgtgaaagtacattttgaaaagcaagaattagaaacttccatagaccaaggaaaattttcatatatatggatttgttacataaacaactcaaggtcataaagtacttgcagcaagttctagggggcaaaagtaaatgctttagttattaattcatggggcgaaaatggcttaactatagttatagtcttctgggaatgtttgtcaaaaatagcatttggtttccactcctgaagtggattggacacatgtctcatcttgctccatatacagcctaatttatgttcaatgaaagagataactgtcaccaattccacaaatttgtctttgtttttatttatctttccaaaataaatagtttagatactagattgtacataatgacagaatcgtggacatcaaaatctataattcacaagtgtgcttgtaagcagttggcatgatgataaggaaggaggacaacatatctaaattttctggattatcttcattaaggcaaaaatttttaatcctccactttattttttatattaaaacacttcaaatttcatgagcctttaagaaaaaaaatacacttttgttatgtgtttaatctgtagatatcaaagaaacccaaaccctgatctaaacttgacctgttaggaatatggaggatgagggtagctttaggttgatgtccaagggaatcatttcatgaataaaatacgcattgtgcttgagcatctcttaatgactaccagccatcttggacaaataatagagccatgatagcacaagtgatgaggcatggcattctggaaggggaaaatcaaggtcagaaatgaaaagtaatgggtgaaactgcaatactggtccctcgtaatcttatgggtcactagctaatgaaagtgcaatgagttcctttgataatacacctttggttagcacatttaaaatccctgtaaagagctcaggagtggcaggggggaaagggaaatgcatgtgtatgtaacctgaacatttcaagaaaaatttaacaaaaactttgagacattcattggggttatttagaatgctttaggtttacctctttctgaagaataatattcagccagctgcattggattggctcaatgacatatttccctacatgggaaatccagtacatcaccatgcatttttctgaactttttgaactgagatgttctatttttgtgacgttttttagatactcgtaagacttataatttcctatctatccactttcctatctttatgaacatgagcaaattcctatgagatttttattttgcaagtagaaagtagctggtaatatgaagatggagaatatactttcagataacattttaaaaagtgaataccttttacatataccagcatattcttggactttttcaaagcagaatattttaaaaggtaaaggtatttcagaaactaaatgaatgtgtgaattaaatttaaaaatatatagggacgacattcattgttttgatgttattgttattgttctcattgatagcacctgtattcatgatccctccttcagtctttcccctctcttcgtactctctcaatatctcctgggagaagccagcagataatgttacaagaggaaaagttgtggggtatgacatcaatatgctttctgaacaatcacctcaacagtctattcccatggcgttttcacaggtattgttatttttaactaatgtcctttcagaattggcttagggcttcatttggacattttttgagtttgcagaattctgtgacagaattctccctctatattgattaaacagggcattttttcttaatataatattatgtgtacaagcctccctctttgtatgtcacttgtatttttccagtataatcatatattgaaactaagttggtataatttatttcataagacttgttttttttccatttatcatgtatccttaaatattttacatgaagttgactttcattaactgtgtactatcatgttatttggacacacaataattatttaaccagtccacactcagttgatattgtattgtattaattcttttggaaatataaataacattgataaaacttcttatatgtacatttcatatacatttctacttcaaaaatctgaagaattgaatttatcacagcttataacaaaatgaattatgaatatgttcaaagttttgaatatacagtcatatattgccttctagtaattcatcccccagctagcagtagtgagaataattatcatagctaaaagttactgaggctttactgtgtacgtgaactaattcatctgatacatacagcaatcctagaggataggaggctcttgttctctccagtttacagttgtggctgatatacctctctgcccattttaccagcatccaggtggccaatagcagaagctgatggaaggatgtcaaccgaacaagttcttctgtgtatttggctgttcagtgcctcctctgagagagatgctcttctctgggcattagcataagataaaaagatctttacactttatacctactcccatagatctagccacatttttctttccatgaattcctagttcctgatccttccatctttttttttcatgcccttggccaatatttccaagccactgccatattgtccaggtacattttaccttgagacacgtctctttccacacaacatgggtgaccaggtgaactgcctgaagttctgcccactaagaggatttcttcgctctgctgtttcacagggtcatctctgacaagggttttagagcaacagctaccatttagacttgcagccacataccaagacatcctatctgtaaactaaattctgctttttttccacattctttcagctcttaagggacctcccatgggtcataggtatgagctgaggttgagccaccagtataagaatggtggatgtcatgggggcctgaaccacctgcttgcacaatgtattacggcttttggctctgcttatacccaatctcagacatccacttccattttatgatgaatttctgttgggcccttctaacctcaagacttggctgagacaattccaagattataaaaaagtagctctagctgcatggctatttggtgttccatgaccagatgttctgtttttactgaagcctgaaagcatgctagggccatttagcaaatggtatatagtttccattacatgttatgcctttgttccaagctcttggggtctatctgccctgtgattctctttctatgtgtgccttgcaacattttttcccacaatgcttacctctagtgctgtaaaaattactacatgttatgtcccaagtggctcatctgcctgtaccacaggctggacctggtgcagagccctttccgcctctgggatacactcaaaactggcagcattccatattactcagtaaatttctcagaacagtattctcaaatgtggaatatgctcccttcagaatgtgaagaggtcaactagacattttgtttccttcttagtggtggtagaagcaaggtgcaataatttgtcctttattttggaggggatatcctagcatgtctcaggccacttgaactcctaaaaacttcactgatatggtagattccttaatcttcataatattgctgtctcactttctagaacacatatgtcttacctctgcatacctaccatttcttgtttgtctgattcatttaatatgatgctatcgatataaagaatactgtcaaggtggcatttatagtttgtcttaaattggtgattaatcaccctcagatttcctttgtctttcttcagtgcattgatggcgaccagcaagatccatgcattgtccttataattactagtttccccagagtagtccttgtaattactaattccaccaaaccagtgaattaccttctactggtaactcatcgcagttcaccactaatggaagtttaagcattgcaccactagggcatgctgtggactgttagtactctacctgctgtctatgatgagatcattgtaaaccagcaagtggatgatggagctccaaaatatcattttagagtctccttcctagggccagtcctgttacgactatcttagggcaaattcccccggaagcagactcttggtagaggactgagtacaggaggtttattgggggaactctttcagaaacaacaaatgtgaagtgataaagtatgtaggattgagcagcaaagaagctgaactgtgatgcaatagtggaagcagcctcagcggattccgtgggtagttctggagctgaaatgaccctcttagcttatctcaaattaagctaggaagtcagacctttgtaccctagagtatttgtgtcctcgggctggtgtaacaaattaacataaactgagtgtcttaaaacaacggaaatttaggtgttagtacagccaggtcccccacaggctctaggagacaattcttctcttctacctacctgtggctcctggtgttccttggcttgtggcaacataactctaatatctgctgcctctgtcttcacaagtcctactctgtgtctctgtctcctctgggtctgtgtgtccgtctcatttctcccataaaaataccagtcattggattttaagctaacctgaaatccaggatgacaactaattaattacatctgcaaagaccttatttccaaacaaggtcttattctgaatttttgggagacactatacaatccactactaataggtttgccatttttttctaagcctttttaggagaccagaacccatgtacaacacacaattttattttctatactgatgaaaaagaagagccaataaataatttatgattacttatttttcattaatctgtctacgtgttcactcatttgcaattatctcatgatgaatacacaactggcataatatatatattttgacttaaacaggttagtctaccgatctggtataccatgggatttaaggtaaagttagttgtaactttcatgtggtctttgccatgttgtatctcatttatactcaatgttttattttgttgtttttactattctctggctttataaactattctttctttgtaaaacacagttttgatttatctattacttatattatagtagttgttgttctaagaaaaaaataaggtgagaaatattatttataaaatacagccttagaagtcaacctgtttgttcatattccacatctcccaattattagctgtatcacacgtctctctgcttctggttttattcatctgtgaaatgggaaaaccatttttgctcacctacctgcttaaagagcctgataaatattgacacattattattagtgattattattaatggtgtggaactacattatactttataaactagctatcatttaatggggcaggaaaataaatatttttattattgttgttgttatttaaaaggctgttccttatggctgaactggaataaggacatagatatatcaccttattctcttttttatttttatttctttgagacagagtctcgctctgtcacccaggcttgagtgcagtggcgcaatctcagttcactgcaatcttctcttcctgggttcaagcaattcttgtgcttcagccttccaagtagctgggactacaggtgtgtgccactacacctgactaattttttttttaatttttatttttagtagagacagggttttgccatctttgccaggttggtcttgaacccctagcctcaagtgatccacccgcctcggtctcccaaaatactgggattacaggcatgagccactgcactgggcctaccttattctcttttgaactctctctcctgtgcaaatattctctgttcaaggaaatgaaatcaaaagtagcagaacaaagtccaattttttaccttctcaatgattaaatttgtatctgaactgacctgagtatgtcttgttataatctttgtaaataaatagccaaaattcccagggaaaatctactataaaaataactagtaagaaacctttgcctaagaatgagacaggggggatacgtaaaagtggtgatgatgtaggattcattgtgggggatcaagctgctgtagaatttttcctacccctttgaagacttatttcatgaaaaactttcaattagatagattttataagacttataaattgactctatgtacatgataaagacaaagtctatccaagtgataattttatgctgcaagttctggggccaataatgtatttttaaaataatgtaatttataataatcatctgtaaagaaggaaaagccttttcaaaataaatattagtgtagatttcttctttcttattttatttcatcgtgggttcttgctacaaagaatattttgcttaaaaaatagttgtacttcctaaattaaataagaaatagcttcatgtactttatcctaaaaacaataccattttctaaaaatttacattgaaatctaccaggattattctaaaagggatgaatattacagcaatattcataagtttaactcagttcaaggtttattttacttagaaaattttaaatcacatttcacagaaaagtttgtatcttcattatatcaataatgattttaaaattagaaaaataaagaattacttggtatttgatgtttttcttatttcaaaatgtaattgcaaggaaatggttttaaagttttaaatttaaattattcctagagttttagaatctttaaaaacacctttatttctgaatgttattgaaacactgtattctacattccaatctcactgctttttagaacaactcatgtaacttacgaaattttaaagtcaacacctaggcaaatattccaaatgaattttattttacccctaaagagaaagtctctagaaaactactccaaatgttactgaactttacatttatctgtatttatatttatggaagattattttatatgactatgtatcagtagccctaagaaaattagttttgtactcatagttactgtcatactctctgttttaatgacttttattttctgaatataatttctagtggcctttgtacctacaacctaaacaaatttacatggttgcttttgatcacttcaaattataatgacagaaccaactctcaatgttaattgtttaataatttatttatggactgtgagtttcctgtcagtcttctttgctcaaatctgctattttcatttgaaattatatgataaagataatatttcaaataacgtaactgtttgatctaatctttatatgtttgtttatataagaaagatgattgagaattgacttaacgtggatgctcagtaatatgcttaatgtttaattttttcccctttttcttctgtgactttttttcataaagaaaatgatagtatcgatttaacatagcaacggcatttctttctgtcctagcaccatcaaatagcttgggtattactgctctgggttacttttggccaagccccatggctttgtttggactttatcatgataacaatgacaatgtcaccgtctttatctctaccattggtgacaataaccataccaccatgctgctttatgaggcaataacttggttttctcatttatccactcaggaactggattattacctcataaaacagtgtgattgtacaataatcaattaaatcctggcttgtcgagactcttcagaaaaaaaaaaaaaaacccttttcctaatggtggttggcaataattccctctgtctgaattcatggaactttgactgccaaggttatattttcacactgattacctattatctttctttctttctttctttcttttttgccttgaagctgttgcacactgctaaatcccaagaactatcttacactgtagaaggactgaaaccttataggatatatgagtttactattactctctgcaattcagttggttgtgtgaccagtgcttcgggagcaggacaaactttagcagcaggtaagcaagttttaatggatatgaaaaatctgttgcctatcaagaaaaaaaacttataatattcaacaccttctctacttgagactttatatttgtcttctcctccctcactaactctgattgcttcttacctcaacagttttaaacaacaacaaccaaaacgtaacttaaagaggtacctaggagctacgagttacagctgtgtcataataagaaatataattagtggtagagtgactccactctacaactagaaatatatagaatatacaactagaaacatatacaaatatatagaactagaaatacatagaaatgtaattagttgtagcgtgactccagggcttaactaccaacctgtgtcctagcagtgtcctgacaattgtgagaaacaatcaggaagcttcttatgaggacgttaggatacctcttccctcagtccagacattttttgtaggcttggctctactcactcctgatccatgggaacatctagaaattactgtgtggcctggtgttatatttggctttcatgaaataggtaaatgtttatctattgttttattaagaagaagcttttaagttaataaaatttaaataaaagaattgttattaagtataatctgagtagaaatggtttgtataatttgtgcttgcttcattcaggactaactggattcatacaaacctgattacatgtattagtaagacttataaaacccaattatttagcattaatatattttcaaatcagtgtttttctgattctagataaaagcttagtttcctggttatctttaaagaaatgtccatgtgtaaggaggttaagacactctagatgaattacagatattacgaaaattcatgtttacctgtaaaaacatttcctagacctcctccccaaatcccttcatcctattattaataggtccaattatgtagggttttttttctggttctggaaaaaattgcttagctcaaatgatctcatccaagtaatttatttttttcaaaattttcattaatgcaaacaactctgaaattctaagaaattatggtttactaaatttataactgaacactttgtatttttatgtattttatagatgtgcatttcagatgcatgaatacattgatggagtacctagcttgtacaaaacactcttctcctataaaactatctgtttttgtatactgtattattaaaggtttactgaatgctgaatatggacagcagaggaggactctatctcctttaaatgatacaatttcagactagaagacaaaaattaaaataagaatcagtcttacaagttggagaaagtaaaaatggagacaacggagggtgaagactgggtgtgttatagtaggggacatagggatcccaagcacgtggccatgcaaaactggaatcacatcctctcagggttgcaaaacatgtaaaaataatctagtgttactatatagccagtatcaatatattctttgtaatattcccccaagtgttcatctaacccatgtctgataccttcagtgttacagaaactactacgtctcagacaaagctataccatctttagatacctcttttagaatgtgatttcttagattggtcaaaaatatctcctagtaacttctactcaacattcttattctacttccttgggggctgtcgttaacctaatttatcatccttccaataacattttcaataacattatatccacccaagtcttttctcctttaggctgcatatcatggtggttcccatctgaacctcatatgcaatagtgtctagagctgttattagtataattcttgtagatgagatctagtctgccttttcatagatataagcaaactaaagaacctgaagagagacatgcccgtccctagaaactagctggatcatggagatgggaatagaagagcaggaaacatgtctacagaatagaatctgcctgccctatgcattagtggtaacatctgtgctaatagtatcctcattggttgcagtggcaaaatcctgttgcgtaaaagatgatgtacctgggtgctctgtgcagctctcattttagttactggtgaggcgattaaaacgactcctgtccactggcaggattgtgaagtaaaactaactagtcagagccctctgaatcctctctctattttttttatccttgaaaaatagaactggaaacttatattcgctaaaagtcatgtgacgtgaaagttagttgacttacaaaaataagagtttattcatatatgtgaggggaaaaaaatggttagccaaaatgccagggtttcaatccgggctctgccattgactagctgtgtgaccttatataaattatctaacctctgtgccttagttttccaatttataaataagcataacttatttgtagggttctgatgaggattagaattagttaatacatgtaaaatatttaaagcagtgcccatcacagttcattctcaataaaaatttattgtcatgatttttatcataatattatagaagacttttgttagtcacagtataaatgttatggaatttctaatgttatcaaaatcaaggagagtttattttacaactttgattttctaacattattataaaatataaaatggagagttctaaaactaaggattgtattgtgaaaataaaacttagaaaggcttaaaatctgaaagcattatttattatttctgtaagaagtatgtcattcagaattattatgcacatttcaaaactttgctcaaaaacagcaaatttcacatttgttggttgcaatatagagttaataatgtgccataaatgtattattactacattttattgtgaatgctcaattcagaaccatctcttgagggcttactatttaaagcactgtggaggattctaagataattatactcagcatttgggttaaggagttgagatccaacaggtaggattaacaccatggcgacatgtgctaagggctgtgagaaaggtgaaaaaaatgctatgggaaggtagaaaatgagataaatgattttgatttgggagactgagtagatacctcattaaatgctatttcagataaactataaaagaatggtaaagactttcgcagatatttactgagcacatacaatgtgctagtttctgttttaggggctggcactgttccaagtactgatgtaatgaaagcagagatttatgaagacttccctggtggtagagtacacaatagattagaagagggagtgtaataagtgtctggtagacttttttaaaaaggcaataagagagtaaatcagacgagtagaagtgaagattgaaagaagggaatggagtgacttcaaggaagacagacctggaagttaagcagtgggaaggatggacaatgatagcaaatattgcagcccatggtggtgccattaaataaaaggggaaagatgaacaaagaacagatgggagaaataaactcgtgagtttatttgatcatttgatagaaacacatccatgccaattataaccatccaggagcagaaattgcaaatctggggcttaaaaatgatgcagattttgtattcatctgcatatagatgggagctaatgctataggttataatcaattagtgaaagcagagaaaatgcaaaatggaagcccaaagaaaacaccttagtgaatattctatctgggaagaaagaagaaaggaagagtgaagtgaacagaggtatggtcagaattaggaaaagaactgagaggaagcagtatcagaaaagtcaagggaagagagaattctagaaggagaatattgtctgcagtgtcatatggtatagggaaagcaagagaaatgtgacctaaaatggatgcgaggtcactggtgactctctggggattaccctaattagcatggttgaagcagaagctggaacatgaaggattgagcagcggcaggaggagatatagtggtaaatttcaaatgtgtttttttttttttattctttgctaaaatttttcttctacccaattttcattcttcaaaaaattgtattaccttttgtttccatataaaatcctttcttttctaaagaaaaatttattttagtgtttgtttttttctggaaaaaatgtttattttctaattccttaatatattttgttagaactatctgattcttcacctgcccagcagaaaaagaaagtctcttatatgacaaaagtatggaaaaataatttttacttacagttgggtttattataaaatacatcatttttagggttgttcagatcagtgaaaataaacttatttgcttttatttgaataccaggaaaaaattataaatccatcattctttttgcctccttccttattcagtagatgaatgtgtatttctaaatgtttttccaaaacaaaacatctgaatagaaagtatagacattaaatcatagaaatacactgcagacctataataaagccagttctttagaatggtcaacaattttgctataggagagtaataaaagttgacttgcaactttactgttcatcctgctctgttttttctactattaacattgcaatttggagagtatatattattccaatgaactccaatggatttgtgggaaatttaactcttatgtctaatagctcatatgagctcattatcagacatcaatggaaacgagtgaccattcaaaaattttgaaaaagagcaccacaaattagaagtagtaattagccttttggaagcatttgaatcatgaaaagatatgttgcccccttaaatctcggtctcaaaaatcagaaagatacttgtgaagatttatcttgctgtttcattaaaaagcttgagaattataattggctctctcttgttttaaacattttttcaattaaatatatgattagaatgggtacatttcatccagagtattgcactgctgcttctttagtttcaatgcctgtgacaaagtctgagaactgatttgagagaggtgttctctcaggagcagctgcatctctctccattgcaaaatcttcaagcagtgttattaatggctttggagttgcttctgggtgtatgaaggtaatgagttgatgaactgggccctcttaaaatccttgttacacttttctttaagattctccttttaatccgagaaatttgtgcatttccacccattgcaaattgagtttagtttaaacccttcttatgagaaattacttttggagatccattcctgaagggacaatgtgatatttcccttgcctgtcataaattgacctccatactacaagcttagaagtgcccatctcgcataaaacaagtaattggtgtgcattaaattttctttctgaatgcaaagtaaaatgtataggctgtttgctgctgggttgaaaacacacattgttttgcattcgggtacataagtcttttccttgtgaataggagccagagtgattaaacaagcactcttaatatgttaatttataattttaattacaacaatcttgtatatatagtcattagtgaatactaatataaatatttttctacctttttattcataatgcataaaccaatcacccagttacttctctgaggttgcctgtttttgtttcataatacaatctttgttcttagttatgaatgcattttgttcattcctgtcttcaataatccctcattaagctagtcactttctgctccatgctaaaaaggaaaaattatcatgcaaatgtggcatgccatattaaaaagcacattaccaaacacttttgttgctgtccttcaattagtttcccttctttgaatttaattccatttgttgttaaactactgacttgatgtatggactcatgaatctgaggctgctgccaagaaagtggggaaaaaaaatcaaagcctcttcgaagagctgcagaggcgagctgaaatgaatttgcttcacctttgacaagaacacttgaacagcattggaatcctctgatgattcaacttggctaattatccaattatttatttcaagaataaaggcaccattttacaattaaggaagtgtaaagtagtctgagaaatttggtaatgacagatgacttaagtaacttctaagataaacagtatctgtgcaaaacttgtcccaccaattgttttcaggcagcagttggtgtgtcttagcatcagtgaaatcctgagtacactgaaggttttttgtttgtttgttttgctctttcaacagaaattattttacacttgtaaccaacatgtcaaatttccatggctcttaagcaatgtttaagttatatttctcttgattaaaagctttcggttcaaagcaatactttttaattgcctaatgatataagtcagttcttaggaaagaaccgcacatttaggagttcatttgcaatataactgaaaaattcattgcatggcagtaaaacaatttactgttaattacaaggagaagaatttgctgtagcatgctcgcagattgccatgaatcatgcagcactcctagagatttataacagatgtgtaaatgggatgaattagcagggtttaataacagagacacaaatcatgcagacttcaaggagctttaattgatatactagaatgtgacgggcatgaatcactcagccattcaacagcactgtaacatatggtcagctcaatatgccgcatcttaaatcggttggtgagtcgtaggttgtcccatatggtggaagcaatacatttttcatgattaaaaaaaagaatccattttttaaagaaatatgattgcaaagcatgttattgaacagtcttctgaatgccaaactgctttttttaaatgcttttttttttctttaacatggcagcttctcaaaataaataggggctactccttgtaataccagatcgctggaggcattataagaaccaaatcggtgcttgttggcacactcgatccacagcaagcctatagaaaagcgcagctgatgattgctgtgattgtcagggaaatccttcaggctggggcaaaacaaacaaatgaaaggatgatgtcactttcagagaagttcaggaatgcccagctttgtaaattgaagaaaatgagttggatgagagatccctgcttagcagggtaagaaagtggctgtgataaataataccatgacccctaaggtaacaattggatgtaacattttatactaacttcttaattaaatgctcagtcctacaggggcatgtgaaaagaagcactggctggtcatcacatagatggtagcaccaattccaagtcattcttgaagaattatttcagtatctgcaaacaggtaccctggttgaagactggtaactggtagtgtgcaaacatgtttttattggaactgggatctggcagcttttggaaaagcttttgctgcattagtaaatctgacagacttgaaaaaggaatattgcagccttagaactgtggctgccagaatttaatgtcaacaattaaaatttattttgatccttacctagtgtttattactgtttgtatacacaacagaccttactaatacagagatgcactattagatggaattaccatctgttcagagtgaaatgctggcatctgtcttagatgctaaaactaaaatgatattatttctaacaaaacaaaattaactgctttttactcaccaactttaatttgtagtgtgtagttgtatccaaggaaaaggcttgattttgaactatgtgatgacctctgtggccaggtctatatttagatatgcgactttatcaggggctctactggcctttttggcatatgaaaatggcatgtagaaatcacactttcaatacacaattatagcttcataatatactatgtatcctataagtcattaaaacaacacaaccaagctatgtaaaaattgactgaatcagagagactctactatgcaaaatattttgacagatacgccctaaaaaactgcaaggaaagaaattaaataggcaaaaaatcatctgaacaaagttgctataggtcccacagtgacatctttaggaaaatacaaactgtatctttcttctctgttagactattttaaattttctcccacatggacatatataaaaaatttacattcagtgccccctccttttaatttaaagcctaagtatcctattaaaataggtctttagcttttggaagttagagaatttggaggatcaaggacaatggtagtttccatactgatgttagatcagtgacgctactttctgagaagccagacttctattctatatatcacaaaataataaattgtgtcacaccagcatttaatgcatgtacacagtgcattaactgtaactgtagtacatttatttgtgctgcaggagacttgaaaatgatgaagaaatcgatactttgctgtcagagaagcaagtgttacgatgcatttaagtagttaattgcataagccccataaaagcttcaagtttgggtagcaaggatgccataattacagtctgagcaactaccttttattagtggtggactttagggaatggtggttgctgtcatcattgctgctatatgtgcagtttagaaataatggatcctcttctctcttcatgtgtaggatggtagttttgtgcaaattattgtgatcgccagaacaataactggttaaggtagtgtttgttcaccatgttcactgaacttctctaaaagcagggttttctttatgtcacagaacacatagacaaatcatatttgtatgccatgctaaggtaaaggaacaaggtggctgagagctgaaggggataaaccagaggggctcctgctggcttcccaggagcaaaggggatcaggatgtctggtacccattcgtggcttatgaacttagaagtactgttttaaattattcaaccaaagaattttgaaactggaagaggtcctagacataatcaagcctgtcactctaacaattgaagtaaccgaagaatagagagacctaataatggattaaccaatgttccataatcagggtcttaaagagccaatctagagcctacattttctcctttccagatcttctagtaatatcctctcctgaaggtgacttgtcaacaaagaagaaagtggcaaaatatattttattctttcttccctggtcagataatagacagtcaacaagatgatgctgagtcacccctgagagtttcgggggaaaacttttcctctttaagacactgattggtgagcagctgattctgcagcagtctctctgcaacagagaaatcagggctcatgacctggacttcttgtttgcgtcctggtccagtgcccttttgcaagtgttctggcctagcagtgtttggcaaattgtatttcctggcatagttttgcatttctgcgaaaaagtcaaaatcatattctattgacagggtgcttattaagaatgtcttatgtagtctgctccccacccacccctgaaacatagaaaaattgtttattcttaaattcttgtcatcatcatagaaagctgatgatgctttaagatattgacacagccatacagtcttcataggcaaaaaatgaacagattccttaaaaacaaatgaacagattccattttaaagaccagtacctcagaagagctttgttcagcttttagttcttatcctatggtgctcaaaatgctacactacataaattttgcaagtctaaatgtattcatttggatatactactaattatgttataaagtaataaatgctgcataaagaatgcatattataacattttataaaaatatctatacatcgaatagatagacaagaaattagattacccctattaaaaaatacaagtgctattttaaaagtacaagaattttgtacttttattcaaatagacattttattcttagaaatgatggataatgaacattcattttaaactttgtatattatccttagaaataatgaatattgaagattcgttttaaactttacatttacaagaattttctgggtaaatacagatagattttgaatatagatgaattgtattccttaatcatacataatttgaaagatttgttcttgtaatgatagcaccttatatttgtatagaaacttgttttctaaaacataaagcaaatatgtatattgttgtagaagcaattgttgtcaatgtatgtcactgaaaatgtatcctcatgttgcagatgggaaagtgggagcagatataaagggatttttctaagatcacacagatttagacattaaaaagtgaaatataatttttaaaagtctaccaaatccctttcattattcagtgttgtctcttaacgaactgttttgtaaattaacaaatctttaaaagtcatatctacttttacctatagttccttttccttgaaaatctgacgaataattcatcattaccccaatctcttggtgattctatgtgcatgtatgtgtgtgtgtttaatggttcagaagtatctatttttcttcttattctacttgtgtgtatgtgagaccagtctagtttaattgattgacaatttcacttaattcccccttccagccttagaagaactctgaaaagaataactcagtaggatgttcaccctttcaaacaggcttagttgactcctccatgtgaaactgtaaaacacacctactggaatgttttttgttttgtttttcttttaagcaagagaataaaaaatgtactctagttctattcattctcaggaattgacttctaaaggacagtcccattgctagatggaataattcctctgggaatcaagaagtgctctactacttaaagtttaaatggtaaacattaactttaatggactctcaagaatttccctattgattagaatcactttgccaaattaaaaaaaaagtgtgctctaattttcaataattattacacaaaaacgacagagttgccagaattccttttgtttagttttgtttcctattactcttaatctatattcctgtttaagacgtaatttttggattatgctactgatgggggaaggaatttgatttctgtggtggtgctgagcttcaacattatctccattgagttgagtggttggagtaaagtagagatgtatcaactttcaaacaaatgggacctggagaaaggctgctttcaaacagcaatgaaattcttcagcttttaagaagcataggaggcatattcatacttcttctcaacatttagttaaaatggaaatcctatcctcaacacaccaaatatgtataatttgtgatgctctgtctacatctttggtgtccagtatggtagtcatgaatcatatgtggctatttaaattcaaaatacagttaattaaaattaagaaatttgacattcagtttctcattctcactagctacatttcaagtgctcaatagtcttattataaggctagtggttaccgtattaaacattacagtcctagaacatttccttcattggagaaagttctattggacagtactggtaaagtagtttttggctattggatattactaggttagtagtttatgaaactaaaaagttcaggtttctgtgtcccaaaaccctagggaatctagcaaatttcaatttaaacattatgtaattggttctccattgcttccctgagcccaggactaaaaaatctttggcagctttcctttcctagttgagattatagccaagaatggcctgctaaaatcttaatacaaatatgtaactctaaactctgaagagagactctgggtgaagaaatttctgaatggcttagccttttattttgttttggattattttgaagtgagatcataacttgtagaatgaaatctttgagaacctaccatttaactgatttttagcagaaaaaaatgctaagagaaattatgcatataattcacagattcatacatatataaaaataaaatatcacatgggctgcagtggcagaaaataaccagaattgttaattatccttctaacttgatgaactttttgctcagtgccttttcttttttactaaaagttaaaatagaaccaaaatgaattgtttctttttgaaaagctggccgaaggtctaaaaagtaacaaatactaattgttctaagctgctttacggtgaatttcctttcatggtttaagggcttcaattcttatatccacatcattttgatttatatttattgaaacaggcaatgactttgcgtctgtgtatggctgtgttaacacaggtgtaaattgaaagtccacagatgtagtttgggcccttaataaataggctcggtgattatgacatttgttcctttctccacattcacctctcaaatccagcagacatacttaaagggggaataaatctcagctcacaaactcaactgtttaagggaaaaaaaaatcaaaccaaaacaaaccttcattttcaataaatcagctgttaatctgaatgagcaagttgtagggaaaaccttaatctccgtgactcctagggtttcccaggaaccttcaaagaattgccagtgtcccaccacctgaaaggatggcaaggtcccagtgtatgcaagggcatgaggtcactactgctccaaggctaagcccactgctggtggtggggtcacttcagggccagggtgctctctaggaccaagaggctgaccaaagttagttgcctggaccgttgtgtgtaaactgctgaactcacaggcttgttattttgtgctgatgctctgtttaacattcagagtgctattgcttgtttgctttcatttagatcagtttttaagctttaaaaatagaaaatagcgtataaaaggagcttttttgaccaaagaagatatacagatggcaaatacacatatgaaaaatgttctatatcatatgtcataaagggaaatgcaaattaaaataagataccactacacacccattagaatggccaaaatctggaacactgacaacaccaaatgctgatgaggctgtacagtagaaggaatgctcattcattgccagtgggaatgcaaaatggtacagccactttggaagacagtttggcagtgtcttgaaaaccaaacatgctcttaccatatgatacagcaattgcacttcttggtatttactcaacggagttaaaaacacaaaaccctgatatataattagatgtacacatatatatgcacatcatagcagctttattcacaattgccaaaacttggaaacaaccaggatatttcatcagtagatgaatgaataaataaactgtgataaactatgctacatccagacaagggaatattatttagcattaaatgagctagcaaatgatgaaaagacatgaaggaaacttaaatgcatattactcagtgaaaggtcagtctacaaaggctacatgctttatgattccaactatatgactttctggaaaaggcaaaactacggagatgagtagttacctggggttggggggaaggagagatgaataggcagggcacagaggatgttttgggtagggaaaattttctgtgtaatagcataatgatggatgcatgccatcatacatttgtccaaacccagagaaggtaaacaccacgtgtgagccccaatggaaactatgtactttgaatgaaaatgatgtgtcaatgcagatttatctactgtagcaaatgaaccatttgggtgccggatgttgatattggaagagactgtgcatgggtggggagatatggtagaactctgtaccttcttctcaatttttctatgaacataaaacttctcttaaaaattaagtctactgggcgtagtggcacctgtctgtagtcccagctacttgggaggctgagacaggaagattgcttgagcccaggagttccaggctgtagtgagctatcattatgcctgtgcatagccactgcactccagcctgggcaacaatgtgagactccatctctaaaaaaaaaaataaataaaggttacccctggcacattgcctatggtgtagccgtgctccacaggagcaatcaaaaacaaaaataatgaaagtctttttaaaaatgactttctgatgtatttttacacaagcacaaagttttggcaaactcgtgttaatattccttcattacccattggttggcacggattatgctttgcctgtgtaaattacagcacggagttgatgcctctttaaggcaaggggctctgccctatgggtttagtgctagtcattggctgtaggtttcactgcgggatcctgtggctcctgggtgaggcagctcttactcagccaagggaagttctacgcagaagggggcagccatgagccatcagaaaccaacgggcacagaaactgggccattggggtacctgcttggtagagggactgtggttggggcaccacccagagtacagcagctactataatatataagatctattatttagctaaaaagaatagagaagttattttcaagaaaaaatttaatttgaaagttttgtgtgtagtatattggccatttaaattttgtttcactgcatttaagataaactctatattgtgttttcagttcctagagccatacagatacttgaaaccacaactgatttgatttgaagtgtgatatatacaaatacatatatacgtatatgtgaatatgtgtgtctagagacagaaaccaaattcttgaatataacaggtgttttctaatatttagcaccagcacaactgaggccacctctggttaaaggaatcaacagcacaacaatccatcttaggtggtttccacctgaagaactgaatggaccctctcctatatatcagctggaaaggagagagtcatctctaccagctctgatgaccacgatgatgaaaggaatccgtttcataggaaatgggtattgtaaatttcccagctccactcacccagtcaatacagacttcactggtaagtgtgtttgacattgctttatttaggagacacgaagctccaaaatgttttctatattttcatatccctttacaatgaatttttattatacctacttagagaaatactaattcagccctttgatagcttttgcctgattgtttcagcatgtccatctttttagaattctggggaaaaaagtcaggtaagtgaaggaaaggaaaaataaaagatgaagatgaagaagcagccttattggatcaaagtatgtgctttgtatttgtctttttgtgaagtatgtgccaggacatgtttcttgaaatattattcactgtgttctctgagcaaatgagtttgcaaaatgccctcatgctattggagattctcagtatgcaccccgttactgaaactccaaaaagcattgtaagaaagctattcaactttgcttagctaatcatgcctaacagatatttgatgtaatgttttctttttctttctcttgctgtttccttcttctttttttcactgtgacaacttaatatctcatgttctatgaagaacattgtggggaaaactaatcccagggaaaagataacttctctaagccaggactatggtaaagcaagtgaggctcttgtttcggtcacaaaatttaaaggcactaaaaaactcagtgttaatgtaaattttaatgcaatatttttaaaaatgaaaatcaatgtgaaagcactataaaaatattatcaaaagcttaaataaagacagattgaactctgtaccagcacaatcctgcctcactggccttaccctcctcctggccttactagtaccgcaatattttggaagtcccatgacctctgtgacttacagcttctaatagcatgatttcaatatagctgtaaaaaaactctacttatggtacaccatttttccaatttttaaaaaaatttacaaagtataagatatatattattatgtaaactcataaagatgttcatttaatcatccatgagaaagtcattttggagcaaatagctagtctttaaaatattgcatatgtgaagacaatgaaatggaattcgagctataaaaatttgtattgttttatttttacttaaaatagtaaatagtttgcttttcattgagactggctgctgatgcaccttggtaatgaatcatgattatattctaactgagatatattgagattaatgcatgattaactactctctcagtacatcaaaatcattgcagagtattagaaattgaaccattgagctaaaaatgctcaacttctgctttatattcttaaaatggcaaaaaagaaaagaaaaaaaaggtaaggaaaaggaatacatgaataatagtaaaactcttttctcaaatgaaaatggaaactacctccctgatccaatatttggcttgagatgtgtttcttccaagaaatagcatccgtttccattcagctgggcatagctgctgcaaggatgtcagcttggatttgcaggctagccagcagacagatttttgatgggatcacctactgttgttgcagtgaaagatagaatggcccgtccaccgttaataaatttggtcatcctcgctatctcccttgctggccttatactctgaggtgcaagggctaggggcagatgcagtgtctgggaagttttccaaattcctctttaaaaaagttaggctgtaaacactggcctcactaagcaggatccttctgtctataacaaagcctccagctgcacagaaaatatgcttggagtacacaccatttgaaggacaaggcagggagatcacaattttggcttgaactactccctggagctttggtgattcctggagaatgagaagttcttctgtgttcaggcatgttctgggacattgctgatgccctttttagtggtagcttggctttacttttaagacccctttaacttttaatataaccatgtatatactaagttattggtttgatcctttggctgacttgccaggtttggctgaatgattttattgagttgtaccgaagcctaactaaatgtacccaattaatgagctaggacaggttttcaaaaccaactcaataactttctgtaaacttgcatctttcctaaatagagaggtaagcatataattagcatcttacattattcttactgatatattatcctatttaatccctctgcaaccctataaagtagctctttttaccctcgtagtacaggaggaaaagaggctccagtgagtgacttgcccattgtgccacagctattgaatttcagggtggaaacgtgaattggagccttccaaatttaaaggcaaggtctctgctacagggtggaaaggaacttttgtagactgttctttggaagtgatagaataggaagtatacaaaagtaagaaagagggataggaggtgaaataattatcacccaaatattccttatctgacactgctaaactttttggatttgtctttcagttagtttcagctcacaaacagcaagtagtgttggcattatttattcatttatttgtatccccaaagacatgtaggcatcaggtttttttttaatagcaattaaacccagagtgttactagaagctagatgtttaaaatataaataacattatgtgaaatgggctgaagtgttatgcgttaaaacagtgctttcaactcacattcctttatatttcattcagtttttatattctgaggcaaatttaatgagcaaatccttgaaacctctaatatgatgaattacattttaaaagttaataactttaagataaactaagatgtcctttgttttgaattattcaattcaaaatctcaaacttcaactaaaatgacttctgaatagaaatatcaattagtactcaaatacaaatataaggttgatgtacataattatacatattttatatatgaaaagataagttagattgtacccatcaatgacaggaattataaacgcattcataacacatttcatggccatgaacattatgttgcaagtctcagtaagaaatatctcattattgtagtacaagaaagggatctcttacacaacttatgcctctttcatatttgctttaaatatttttatcttacacaatagaaagagaataattcaagcatatgaatatatgtcctaaaatgttgtttaatattgtaaattaccaagcttaatactgtaaataaaccctgtcaatatctacctttgggcagaataaagaaccagataaagctattttgggacctatttttgcttccttttcttttctgatacaagtgttcttttaaaaaatctaatcttcaggaagaatgtattatcagtcatttacatcatagtttaaatttaaaataattaactctctgtatattattatgaggacttcgaagaagattaactgataaattactttcaaatccaggccccattatttattagctaaatgtaattagacaactcatttaatcattttttgtgcttctgtttccttttctttaaaattaacataattccactgacagtattggtatctagcaggtaggtgaggatttaaagtagatagcccacctaatgaactttgcacagtgcctaccacacagattatttagtactcattaaacattagctattagttattattcatttaataaatatttattaagtgcctactatgagacaggagctttcctaagtgagagtattctgcagttataaaatcagcattctattaatttatttgctgttacacatgcaaaatatgtttgctcaaatgttatatctagggcatgagtaatatgcaatattccatattaaaatgtgatacttaattttgctattgaaaatagtaaaattaattgacttagtggtgaggacttgggcaaactacttttctgagtgtctaatcttgctcatctattaaattgaggattttgttgcatgatcaatgttctaacctctaaaattccaattctgtgaacatagaatgtttaggaggccccacaatccaaaatacaggctgtaatcatggcatctgtgagttaaaaaaacacctagagtttaaaataaattgttttctataatattttgtttattaatacaatttaagattgatacaaatttactgcttttctctaataatttaagaaatttagtgatatgggcagagttcaacataaaatagatattcaattattgggtcatatcagatgttataaaaaaagcagaaaattaaaatagtttcgtgatcttgtaattgggcaatgatataaacaatcatggtgaaacagtgccccagttacatggggttaaaaatactttcttcttccaacacagaaatagcaaatagagcctcccctcccatatgcaactagaaggggatatcattgtgcctttggagagaaaaaaaaatcatgctcgtttttttcaggaatgcagagtaaatctacttgatttatacaaagaatttagttctttccttgtaatgctagtaatccaagtggaacctggtaaaaacagcaagtaaaatactgctcagattggcattccaaaggtgaccctctttctccttgtcacttattttttcctattagcgaaaacaggtccatgatcatttgggggaaggtttgactattgtagtatccagatgccaatcacaccagccttttaaactgcctttactggtgaccctgcccagaaatcaggaactgcctttggggagatctttgtagcaaaccactggggagatgagcacacacatgcacctggatataattcccttttatttgtcttcacgagaaatgtgattactgatgttgaatatcttgcagatgagaactctatacagtttcttcataataatgatgttcaaggacactaaatgattgtcatacatttttgtatcatagtattcaccttcccaaaaatggttgaactaaaatgctttagaatacgaaatgcaattaattaccaagggatgaaaaaagaaatgcaaccaccaaaaatcaatatgtttaagagcatattctttatttcttttactccataatatttatgccttattgttattagtcttcttatttttagtgaattgggacatttaagcacttcattaaaagaaagctgattataagcatttatagtgaaggtgcaagtagggcaaacttcttcagatagactaattagtaaaagcatattaattctgaccttcaacacccttggtgtcccactatttgttttccttggagtgggagcaagtattttgacagaaagcgcttgaaaaaaataaaaaacaaaacaactaaacaaaaccccagttcttttcaagacagatttaaatcacaaattttacctaacctttgatgttagatttcagccctagttattgaaaaacaaatataataatctactatgtgtcctagaagtttaatgaacaggcagtaattatactaaaaaagtaaaggaaagagtaagaacatggtatgtggcagcaaagtaaaggagaaataattctcaggcagtgacaaaactctgctgtgttttctgattatgaaacaatcagaagagatgagaatggttgagttaatcagtttggactgaggacaaggatcaaaatgcatatcttcttagaataacagaagtcacactgactcatgataactagagatatggagatgtaaatgtcaagactgtttattttttattatatttagtagagaggtataagtaagttctcaggaaatgccttcaggtggcattgatggcactgcgagatgggagaggaccattatttccccattcatcaactacatcataagaccaatttaagaatgcatgtgttttaacccttgccttttaaaagtgacttattttgaagtacattcctgtaagtctcccttttttttgaaatattaatgttaggtaactggtaagctgagccaacactgaaaacaaactgtttttgttagctgttagcagtattttagttaacttaaagcatctgtttttgtccatcactgttaaaatttttcaaaatgcattgtcacctgatatataaaccacacgtgtgttcctatatactcatcccacatgcataaacatatgttttccagaaggtctctgggttttccgcaaccactcaatgggttctccttgcccactgcctagacagagccagtttatcaagacaggggaattgcaatagagaaagagtttaattcacatagagcctgctgtatgggaaacttgagttttattattactgaaatcagtctcttggagagtttggggatcagagtttttaagagtaatttggctggtaaggggttgggaagtgggagtgctgattggttgggtcggacatgaaatcctagggagtcaaagctgtcctcttgtggtgagtcagttcctgggtgaggaccacaagatcagatgagccagtttatcaatctgggtggtgatagctatttcatgagttaagggactgcaaaatatctcaaacactgatcttaaattttccaacagtgatgttatccccaggagcaatttggggaggttcggaatcttgcagctggaggctgcacggcttctaaaccatcattccttatcttgtagcaaatttgttagtcatacaaaggcagacaggtccccaggcaagaagggggtctatttagggaaaaggctgttaccatctttgtttcaaaactaaattgtaaactaaattttttcccaaggttaggtcaacctttgcccagcagtgaacaaggacatattagagtttataagtaagatagagttatttaggccaggtctctttcactgtcataattttcttagttataatttttgcaaagtcattttcatttctatatagtctcaaatatacctgctcaaattgtccagtgtcttttctgccagtatgttggcattttggaatcttttcaaagacttcattgcttaaaaaaaatgctgttgcttaatgatattttgtatcaatataacacattaattttaatttccccttcattcagcttaaatgggttggaaaaggaactttgagcagaaaaagaatcataattggtcagcaatggtagtgaaactagcacctttgaagatgattgatttttgatttagtaagatgaattattttgtgtatgttttcttgaaaaaaattagttaaaacatttaaaaatgtatagttatagttattttataccagttacagcactcttgaagtgtatagattaagttcctttctattcagatagagaggaatctgggaacatcattgtcaaaatgccatctctttcaaaacttggttccagtgctctaaagaaatgttttagaagattatgcactaatgttactggcggcaaattcatatagatctgtagccacctcaatttttgcattctcagaagaaagaatttgattgaggggacataaggcatattaagagaccaagacaaattttagagcaagagtgaaaatttatttaaaaattttagagcaggaatgaaaggaaataaagtatacttggaagagggccaagtgggtgacttgagagatgatttgacctttacttggggttttatataatggcatgcttccgaggtcttgcgtcccttctcccctgattcttcccttggggtgggctgtccacgtgtacagtagtctgccagcaattgggagaagttgaatgtccagtgtgtttactgaagttataggcatgctcacttaaggcatgtttccttgccagttaagtgttcccagaaggtcatataccggttaagcgccaacattttgcctcttagtgcgcatgcttgagcccactcacccatctcctgagatctcattgggaagctgctgatcacccgtctcaggtgtttctatctatagggagactgcctttccctggcactggctgtgactgattcttattattttagagagatagtgtaacaattatcacctgacggttgcctgacatttctggtggggcgttgtggggggcggtgcttctctgaccctgcccatagtctaactgccaactgtaacactaacagtttcattgaagtgggggaaatgttaagtaataatatgaaaaccatatttaaggtatatatatataaggaggctcacaaacatagccataggccgtttgtttggagctttgaaaagggaggctcagttccttgactgatgagcagtttccatttggaaattctttgactttagtgcaacttcaaaataaaggcatgagacagaaggagagaggaagaaaccctcaagccatctaaagtcatctctggcaatggtggccatatcattttcacaaaaaaggggcatccttggggaatatcataaaggaagaataaggacttaagggaaatgtgtgggaatgattgactgatcctccctccagcagaaaattaaaaatcaatgtagatgcatttttctcagcttcttcccttcatttttttcctctcctgaaacctgttcctccttccgtgtgtaccatctacagtgaatatcactattgccttaggcggaaaccttggaactctccttgaattggcacttgaactattcactcatttcctcccattctattaatgattcctcctctggccgttcttcctcggatacatctcttggaactacctgctggtcctacgctactgcctagtccagacctatgttgtgggcttctctgccaacagtttcaatcttctccaggctgttcttcaaacgaattatttttattggcattctcttgtgtaaaaccttttaatggtttcccagcgagagatgcccttcacaaacccttttctgcttacctgctttctacctatatacctcctcatctctcccaccaaggactggtatactctctagctctagaccattttttagtcccagtgcttgaatatagcacactctctcagatgcccatctctttgaacatattgatacctttgccgggtatgccctcatctatttgcaagtacttcgctttcctttcacctggctaattgctactcatcatgaaagggttagcttagctgttcccctaaataaacttccagcaaccccagcctcctcccatgccaaatctgggttgaggacctctcttatgtactactatagaaaccaacaattactctattttagctcttaccgcattctattaagacaggttgttcagggagctaagctatgaggacgcaaaggcataacgatgatacaatggactttggggactcaggggaaagtgtgggatggggtgagggataaaaaaaactacacattgggtacagtgtacactgttcaggtgatgtgtgtaccaaaatctcagaaatcaacactaaagaacgtattcatataaccaaatactgcctgttcccaaaaacacctgttgaaaaaaaaaaaaaactggttgtttgcttatctatgtttcatgtagactgaaattatgactatctttttcatgcttaacacatttgtgtcttgcacggcataagacatttaccagatactcaataaatatttattaactaaatgagtgatagaaaagagggaaatccaaaagatggatcacttagctgtaagaattatttaatggcaaaattcattatgcttttgaatatagttcacatttttaaatccacgtttttgaaagtattgatggtttagagtgataactcaatttgtttagtctctattggccttagatgtgtaagaaaatacattttaaactgtatagtaccagagacaaaaagaaatttcttgttaatggtcctcagttgctggcaaagttacttgtacaccagttgttatagctagagtgttatatcagaaattgttttctgccccaccatagctatcacattgtgttgctgaaaactaggtggttgcacatctcttagatacatgatctccttaggcttattaaattttgaggttaatgaatattttgacacttttacctatacatatcattagggcttattgcaataggtttaagatgacagtcataataaacatatacagtacaataaaaagcacttttaatcttgaaagtgctttaaaaacaacagtgatcaatgctatggatggattaacagcatcatgctgattgaattctatttcaaggacaatggaggtattgatgttggcagtctagttcagaaagtggcaatggctgtagtaaatggtgcaggttctggagtcagactccccaggtttcaaatctggctccccaacatgctggtgtgcgactttgcacaagtcattcccccagtgtgaaactcagtttcttcatctgttaaatggcttattgtaaggtttcaatgcaatcactgtaaaggattagtacacagtgtcttagtattgtgtatgcatttgtgaccagcattctgtaattctggacttcaattatgtgcctttccattgcatacatatattttatgtccctaagtcacataaatcttgttgatacttctttatgacctctctctactacacggtactctgatcattcactttattttactcattctgtgaacctctgacctgttttttgttgtcattgttacctttcttcttccactagaagcatacatgttctgcatctcatttctccacatctatttaaacagccaactttaaatgttatgtgtacttataaacctaactctattattccccctgtcttcataatcagtcttctcgaaaactaagactctctatgtgtcattttctcatggatcaattactcctcaatctactgtcatttggattcttttcttccacttctttattgtaaatactttcttctagattatcaatagttttcaagtcagagaactttccttaatcctcaccctatgtgccaataaataatattggtgccattttttccttttaaaaaataagaagaaactaaatatttctcactaggtttctccttctattttccctaaactgtgtttcaagctttgatattgctttctacatccacctttaaatggaagagttcaatcactcattcggttcgtatgcagtttttccttatttcactccactagctgatgttatgattgctgtcgtaaaaaggatactgagcaacacaagaatgattcctaaccttagggagcttaaagtcttgcagtgaaatcatgcatcaaacatgtaattaagtaattacaagtgacttctgtctccagctatgaagcatatcaaaaaatcctcctgctgagaaaagaaatagaagctggaaaaaatttctcaaaaatatggttaaagacataagtgagtaacaaaggcttctaggacttgtgggatcaagatcctagatataagaaaaaccatgtaggtgagccttttaaattatctttgtttttccttctgttttgtttgttaattcctctattgcatagtcttagggaaaaaaaaaagacaggcaaaaaattagagtctaggtggggtcctggtatacatgccaggttttcaattgaaatcctagaagagcaaatcattaataggctcttcttcctcagataaagcctcaattattcttaactactaattatactgagataaaagttatttttttaccaaaaatatttagatatttgctgaaagatcacatcaaccagagtcccagagtgtgcaattttttcctatacaatgtcgggcattcaatcaaatattaacaggcataccagaaaatagggccaaataaccaaaagataagataaataaaataaaaaatagaaacatatcctcaagtaattcagatatatggaaatatgtatttgcatacacacataggcatatacacacatatacatgtagatatatatgcatatatccagacacagactttaaaataactataattaatattatcaataaaatcaatgaaaatgttcagaatttaagtagcaaatgggaatatattagaataggaattttagagcggagtaacagctgaagttagcaactcagtagataaaataccaattccatccctgataaagtaaatagccttgttcttaatatcgtatgcaacaatgtaagttgggaacaaaatatatatgaaacacctatttgtagccaatatatagcaacagtgcagagctattatgcttaagtgaagaaaagcaaatgaactgagttgcacacacctggaattattgagctcaagcagagacattagtatatctggtaaaggaataaaaactggaattcagggctacaaaagtagatttggagggtaggttcccagagagaagattgatgctgaaaaataattcaaaaattctgtgtaacaattcttttttgggtgcttggccaacatttagaataatcctatgagaaacatagtagagaagatctgcttggtagttggagctaagtagagatttcacaggcaacatagagctaaggatgcacacatggagtttggacttaaccacagtagagaaaccttggtgaatactctgagctttcactcgactctccaaaagtccgtcctttatgagtaaattcccatgctttaggaataagggctattctttaggaacattgagataattgaaacagattcaccctagtgaagcctaaagccaaggctgagtaaggtcgaggtaatctggtaattttacttcccgtcaaaacagaattttgtattcattagtaaaaggtaaaataatccagaggttttactatgcgtcatccatgaagtgaccaataatgaaatgttaatagtcgatagaggcagacaaagacttcaaaataacttcagttaatgttaagagaaaataaaggacaaggtggacagaaaggatgataagataaaaaatatttcaatgcaaaattgaaatctgtacagtaattaataggaaaaaatggtatgtaaagtaaaatacctgaaatgaagagaatattgataagttttgccaatgaaacattgcagaaggcaagattagagaactcaacggtcaattgtaattgtccaaactgaagcatatcgagaaggaaatgaaaacatgaaaaaaagaacaatgaggtatttgaggacccagaaggaaagagtgaaagaatgagacaatagtaatattgtagaatagccaaatattatcaaatatgaaaaataagttcacacatagtttaacaaagtttagcaaaccataaggagggcaaatataaggaaagccatatccaggtatattacagtcaaattgcttaaaataaaagacaaagaaaaaccttcaaaagcacctggggagggtggggagacttattaccttcagtggagcaaaaataagaatgatgtctgagttttcaacaacaacaataaatgaatgccagaatataatggaatgatactttttaaatgctaaaattatttttttaacaataataacaacaaaagaaaactaccagtcaagatttctgtacccaggaaacatatccatcaaaaatgataaaataaaatatttttcttaacaaaagagttgaaaaaagttatcatcaaaagactggcattataaaaatcataaagtgtattaggacataggaaaagatcccaaaaggaagcacagagctgcaggaaagagtgcaaacctctagaaatggtaactaggtgtgtaaataaaaagtaatatttatgataaaaggcataaaaatcatactttgaagttgataacatgtaagaaaaaatgtatgacatcaattattttgtcacaaatgatgacggggtctatatggagctaaactgtggtaaaattcctaaaaagttatggaagttgaagaattaataatatgaagtaggccatagtagatcaaggattcagattatgatgccaaaggtaacaaccaaaagaatgatttagaaaattaatgtaaggaaacactaaatgttaaataaacacaggttaagctgataaaggagtttgagggtggcaagaagaagccagaaacaaagagcaaatgtggggaataaaaggacaaataccactgtggtgaacataaactcaactatatcagtagttgcattaaatctaaatagtctacccaaataagcataaaagttctcagattgatttaaaaaataaaaatatatgttgtttattcttataaacatactttaaatataaagacaaaattcgaaaacaaagaaagagataagatgtattgatatatagatagattttaagacaataaatgttagtagacaaaatggaggacatttcataatgacaaaaagatcaattcaatagagggacatataatcctaaatttaggtgctacttatagtttcagatatgtatataaaactgaagttgacagaaataaacagagaataaatatatcctcatagttgaagatataaatccccatctaatattttgacaggaaaagtacacaaaatattagtataactatcaaagatttgaaaatgaataaacaattacatctgtatataaaacatgtgacattttataagtgttgtcatatgtagaacatcacttccaacaactatataatatgcatttttgaggaacacataggacattttccaaatagttaatatcctgggctatagaaatcgcataatttttttttttaagagacgaggtcttactgtgttgctcaggctggtcttgaacccctgggctcaagcagtcttcccacttcagtctcccaaagtgttaggattacagatgtgatgagccactgcattcagcttgatctcataatatttcaagttctctgacaactgtgagattaaactagaactccaaatctaaaacataatccgattggaaaatatccctggctcaaaaagaaattatggaaattaaaaattatttttatctaatgataataatgccttaatacatataaaaacattgtaggatggacaatatcaggaatctgatattgctttatagctttaaatgcatatattagaaaaagggaatagttaacaatcaattagcttcccactcaagaagaaaccaggaaattaaagcagcatatgacacccaaaaaatatttgaataaaagaaattataaaaataagagaaatcaatgatatagcaaacagaaatgtaatggagaaaataagaccaagaattgattctagaaaatttggggaaaaatttctttgcaagtgatcaaggaaaggagaaagtacagattactactctcagggatgcaaagagccattactagaaatcttacagacattaaaaaaaataataatgtattaagaacagcactacgctaaaaccttgacaatacaggcaaaatacagagatcctttgcatgggagaaaaatctccaaatttaaactgacacaagaagatctagaaaatctatgtggtcctagatgtgttttaaaaatgaaatctatagttaagtcttttacataaagaaaaccccagggaaggtggcccgattggtggatttcatcaaacaattacagtagaaataatagcaatcctacaaaaaaactcttacagaaaatagaaaattgcaatggtttctatctcattttatgaggtcagaagaacttatacactaaaatctgacaaagaaattaacataaaggaaaacacaggtcaataataatcacaaaagtagattctaatattctctgtgtgtgtgtgtgtgtgtgtgtgtgtgtgtgtgtacataaataaaatgttatatcatgaccatgcaggttttattccagtagtgtgtaatcttttcaaaatgtatgtgattcaacacattaacatagtaaaaatgaaacattctaaattatcaccacagatttaacaaatgcatttaataaaatataataactattcataacaattctcagcaaactagtaatgaaagaacacatcctaataaattgtttttgtaaaagacctctaatagtaaaatatcaagtgctttttcccagaggtcaggtacaggacaaggaaattcactatcaccacttttatttaatgttgtactggaagtatagtactagccagagcaatatagcaataaaataaataagtattaggtatgtcaaagaagaagtaaaccatctttatttgtagatgtcattatttttattgatgtcaaaataatatataaactattcagtttactcagtaaacttagaaaagtgtcgaataaaggtcaatgtacagaaatcaaatgtttctattgaatagcaaaaaacaagtagaaaatgaaatgtttaaaagtaccatgcttactagaactaacacacataaatgacttagaaacaagtctgctaaaaggtaatgtaggacctccactctgaaaactacaaaaaattactgtgagaaattaaagaccaaataaatggaaagttacgccatgttcatggatctaaacacttaatattgttaaatagcaagtcttcctagtttgatctgtagaatccatatagtccctctcaaaatcccaggatttctgtaaaaatttacaagctaattttaatatgcacatgagagaggaaagtacttagagtagccaaggcaatactaaaaaagggcaaagtaggaaggcttatgtatcaagactaactataagactgcagtaggtaagcatgtatagtataggcaaaagaacagataagtatagtaataacatattgccacataaataccccaaataaatacatatatatgcagggcacagtggctcacacctgtaattccagcactttgagaggccaaggcaagagtattgcttgtgctcaggagttcaagactagcctgggtgacatagtgagacctcatctctacaaaaagctgaaaaattagctgggcatggtgaggcacctgtagtcccagttactcaggaggctgaggtaagagaatctcttgaacccaagagttcaaggctgcggtgagccttgattgcaccactgcactccagcctgggtgacagagcaagatcctgtctctaaaaaataataataatacatacatacatatgtgctctaaaaagcacatgcaaagttgttcatagcaactttatttctaataatcaaaaactggtaacaatccaaatttctatcaacagtagaatggataataaattataataaatttattcagtggactgcatatagaaataaaaatgagccaactattgcttcagagaacaatgtgggtgaatcttataacctgttagtgagtaaaagaagctagaatctaaagagtctagtattctatttatataaatttcttctttttcattttaacatttattttaggtataatgggtacaacatgcgggtttgttacttggctatattgcatgacgctaacgtttgggctatgggttccattacgcaagtagtgagcgtggtatccaataggtagtttttccaattacagtcccctccctcccttccagtgtctgttgttctcatgtttatgtccatgtgtgctcaatgtttagctctcacatataaatgaatatgtagtatttggttattgttccagcattaattcacttagaattatgaactccaactgcatccatgttgctgtaaaggaaatgattttgttcttttttgtgattgggtagtattccatggtgtatatgtaccacattttctttatccagtccatcattgatgggcacctagattgattctgtgtctttgctattgtgattagtgtagcaatgaacatatgagtgcatgcgtctttttggtagaatgatttatttttctttgggtataacaggattgctgtgtcaaatggtagctctgttttaagttctttgagaaatctccagactgctttccacagtggctgaactaatttacatttccaccaatcgtgcataagcattctctcttttccacagccttaccagcatctgctgttttttgactttttaataataaacattctgactagtgtgagatggtatctcattgttgttttgatttccatttctctgacaattattgatgctgcacattttttcatgtttgttggttgcttgtatgtcatcttctgtgaagtgtatgtttggctgggcgcggtggctcacacctgtaatccagcactttgggaggccgaggtgggtggatcacgaggtcaagagatcgagaccatcctggtcaacatggtgaaaccctgtctctactaaaaatacaaaaattagctgggcatggtggtgtgtgcctgtaatcccagctactcaggaggctgaggcaggagaatcacttgaacccaggaggcaggggttgcagtgagccaagatggcaccactgcactccagcctggcaacagagcaaaactccgtctcaaaaaaaaaaaaaagagatagaagtatgtgttcatgttctttcccattttttaaatggagttgtttttcttttgttgatttgtttaagttccttataggttctgcatattagaactttgtcagatgcataatttgtatattctgtaggctgtctgtttactctgtggatagtttcttttggtgtgtgtgcagagacactttagtttaattaggtctcagttgtccatttctaaagctgcaaagtgaaatcagtggtgacagaaatcagtagatggggtaataactgaaaggaagcaaaaagaagccctctgagattctggaattattttataaattagtctgagaggagtttataagtgtagatttattttgtaaatgtccatcaaaatataccttgataattagtgcactttatttttgttatactttactttgaaaagttactgaataaatgtttcaagcctgcaaagtccaaaaataagatgtgaaaaaatactgtaacataacagaagcactcaacccagtctagaggattagtgaagacctctccgaggatgaggcaagttgagttagctaggccaaaaaaaaaaaaaaaaagaaaaaaaaaagaaagaaagaaagaaaaagaaagaaggaaagtaaaggagtccaggtagagaaagtatcatgtatcaatgtcttaatgtgggagatgacatgtacataaataaacaaattagtaagcaagaaaaacttggaaattctaatataaattagattcttgccagaagggtgcatggtgaggctgaaataaaaaaggggccagatcatgcaagggccatcacattgaaaattttgaacgtaattttattcatctttataagaccactgtggaggttacagcctgataccaagaatgtttttaagaagggcatgctgatattttcactgatattgtacatgtaccattcatagattgactcactaaaagttgcaattttatttaatcatctaataagattatttatagaatgtctgcaaaatgttagaagatcttccttataagaattagcatagctgaatggtttaaaaaaaaatgaaattctgaatcccagcatggatctattgcattcttgcaattgtccaaggcaaaaggttctgcttgcctgcttcataaacaaaatcaattaaccgagactgcagcattgcagtaaaaagtttaatttaagccaagccagccaagtggaagaactggagttatcactcaaatcagtctctctgaagtcttgaaggttaggatttttatggataatttagtgggcagaggggctagggaatgggtgctgctgataagttgaagatgaaatcataagagcatggaaaatggtcctcctgtattaagtctgtctctgggtggggcaacaggatgggttgagtcatgagtcattagtccaggtgggatcagtttgaaaaacatctcaaaaaagcaatcttgggttttacaatagtgatgttatctataggagcaattggggaagtcaccaatcttgtgacctctgaccacattattcctgaacagtaagcaattataaaaattacacctacattttagcagcattcaggcccctcccgtaatcctattcttgtggcctttcattagtcttatgaaggtggtttttagtctctgagaagggaggaggttagttttagggagggatgatcatctatgatcatctttgctttcaagttaaactatgaactaaatttctcccagtgtccaggaatggccaaagacagcttgaaggttagaagcaagatggagtcaactatgtcagatttctcttactgtcgtaattttgtaaaatcagtttcatcctaatctctggagaagtacctagaaatttgcatttggataagatatacagatctacactattaaagacagagctatcttacccacccccaccccagctatttgtctaagggaaatgaaacaatttgtacatacaaaaggctggcacacacatacgcattgcgcctacattcacaagagccagaaactggaaacaactcaaatatccatcagtaggtgaattgattaataaaatgtggtatatgtatgtgatgaaatactagtaagcaatacaaaggaaagagcagaagaacacttaatcgtaattccacttatataaaattcttaataataattaatgtatagtgacaaaaaggagatcagcagttgcctaggcctgaggaggagggggtgatggaaatgctgtgtaacaatcaaggtagtggttttacaagtgtgtacatctgtcaaaacatatcgaactgaaccatttaaacagatgtgcttcagtatatatgtaaatttttatctcactaaaattaataaaatattctccaagtgattcttgcaacattcaagtatgggaaccattgatttacactgtaatgaacaagttgctttaactttgtttggaaaccaaacaattttaatattattttaccatttaaattctgagctctttcagatagaaacttaagcagtgtgtatactgcttatcactccaaatttcacctgaaacaaattggtatatactgtttgtcataaaaataagaaaatgactttcattaaattatgctgacaatgagaatcttgtacaatttcaatgaaataactttttttaatgaaatagggtttcttttgatctcattcacattcagaagggaatttttgtaaatagaaaggactatattttattttatcctaagaaggaatttagtcagtaaaaatatgaaatagacacttgagtatacagttgaccagttattgccttgaagctactgcacctctgtaatgtatttttcatagcttatataatccgtgttaatatgctacattattaagttcaactgtgagaaatatagttgcttgaaaacagatttcttctgcatacttataaattcagtagttggaaaaaaattaaagaaatataattaaagattgcaaaatcaatttgaccctcacttaaaatgtgttgagtggaggcagcaagcagcagcctacatctgatgctgttctctccttgtttacttcacaaaactgtgcaaattagaactttaatttacagagctgttaaagcctcattaaaaactttcagcaagtatcctattttgagggtttttttccccttatatctaatatgcagcattatctctgttttgtgggcatgtatgaggcaatatctataggcatattaatgtaaactgcatatatgaaatgaaagtttttcacatggaaaggacactagtggtgtctgtcaattgcttcccaaagtgattaatttctccatttacttggtgtttattggcatctactaacactggatctctgttggatcataggaatataattgggctccagtgaaatgggagaattccctgacaccctgttgcaggatatgtgacagaggtgtggcttgtctgcttgaccgccttgcactcaaactccttgcaggagagggagcatgcagatgggcaggtgtgggagccagggcaagaacttttgggctccagtcccatggtagtatctaggggtgggtgcttgtgactcccaaagccccagtgggtgtgttacaatgcccttttagctgtgccatccacatatggcttaagtgttaaccagctcagtgctttcttggtacctgggttcttgtccggtgtccaagaagaatcaggttacatggataaactgaaggatggtaaatgtgggggattttattgctggatggaggtggctctcagtggaatggatgggaaactggaaaggggatggagtgggaagatgatcttcccctggagtttgggcatccggcggccaatctcctctctgactaaccccagccgaaatcctctcaatgttcagatgctccttttcttctcttcttctatgtggcactgctctgctattctcctgttcctctgctcttctgctcatggagcctggggtttggggtttatatgggtataggatagtggggcatggtgggccaaaaggcaacacttgggtgtgaaaacagaagtgcctttttttatttagggctgtgggtttccaggcttcagggtggggcctttgccagggaactgccctcttctacccagcatttccctgcctcctgtctttatcaccagtagacttgttccctgctcttacaggatttcatgcgtgtccgtgtgaagagaccaccaaacaggctttgtgtgagcaataaagctgtttatttcacctgggtgcaggcgggctgagtctgaaaagagagtcagtgaagggagataagggtggggccgttttataggatttgggtaggtaaaggaaaattacagtcaaagggggtttgttctctggcgggtgggagtgggggtcgcaaggtgctcagtgggcaggagtgggggtcgcaaggtgctcagtgggggtgatttttgagccaggatgagccaggaaaaggactttcacaaggtaatgtcataagttaaggcaaggaccggccatttacatttcttttgtggtggaatgtcatcagttaaggtggggcaggacatattcacttcttttgtgattctttagttacttcaggccatctgggcgtatacgtgcaggtcacaggggatgcgatggcttggcttgggctcagaggcctgacattcctgccttcttaataagaaaaataaaacaaaatagtattgaagtgttggggcggcgaaaatttttggggggtggtatggagagagaatggacgatgtttctcagggctgcttcaagtgcgattaggggcggcgtgggaacctagagtgggagagattaagctgaagggaggtcttgtggtaaggtgtgatattgtggggatgttagaagaaacatttgtcgtatagaatgattggtgatggcctggatatggttttggatgaattgagaaactaaatggaagatacaaggtccgaataaaagaaggaaaaaaatgggtattaaaggactaagaattgggaggacccaggacatccaattagagagtgcccaagggggttcagcgtaattacttgcttggttggcaagtttttgggctctatccttgagtttttttatgttgtcatacaccaggccagattgatttaggtaaaaacaacactcctcatttaagaatatgcagagtcctcctttttcagcattgagtaagtcaaggcctcggcggttttggaggacaactgcagctaaagagtcaacttgggcctggaggactgataaagtttgtgatatgtgtgtgatgctagcagagaagtcattagacaggctacagaaggtcatgacagacgttgaaatgcctgctattccagtaccgagagcaatcatggaggcagaaagtcctaaaccgaccatcaagggaattagtggaataactcttttttgtcatgtcggtgtcatgaggggaacagggagctcttcggtcccatttgcaaattgaattttgggggtaaggaagactagtgtacatgtggctgtccaattggcaggtagacacatgtaggtagaggatccacagaggaagaagagaccttgtgcgaggcaaaactggagatgtaaagtaaaaaggtgagaaggagtgctgaaaggggtgtcttgtacccagactcctagggatccacctagggcggcagctgtcagaggttgtaatggggactgatggggtaactgcgtagagggggaggttcgattttcatggtgtatgagaaaacgttgagtatctacgagcaacctttcactgttattttcggggctgggtataagtaaacaagaagagggcctgggaggagagtctgatgagcaaggggaaggtagccaaggatggagtgaaatacagggcacgtgtcttcctaagcaataattactgctaatgtttttaagtttgtcagtattgatagagggcttgtctgtaatatggagctggaaggctccaattgtttcagtgatgtgtgtagttggacttcggagatgaagagtaaaggaacatcgagaaggtgaaaggttacccaggggaattccagtgggtctttgccgagagatacataaaggagcagccacaggaatagtagtttgtgttgtgagaggtccaaatatggggggagtagagttaatataaggagaaaggttttttaaataagtgcgaaggagggcggcagcttgctgatgtgaaatgtctggggaagtcttgctgaacctgtctagaaagtaaatgagttcttcaggagggtaaaggtgagggctgttaaaggaagttcggaggtgtagggagacgggagatgttgcccagtctgtctgtaagacggggacagctgtgtaggcactggaagaaagggaaatgcaaagccagcagttgttcgctaaggagggattagaagcagctaggagagaatgggttaaggttgacagtgtggtggagatagctggggagaggtagagggtgacataagaatgggaatgagaataagagtgagtataaaagtaaagaatagaacttcatcagggtggaagtattggagggtgccttgccagcaaagatcatctatccactttaagagggagttaagagtggcagtttggggatagcaccaagagatatcagctgtgatggcttgaagaaacagtgtaaaccagcagtgtaaacaagagtagggcatttataagtagttgagaatggagaataggagtatgaccggacagaagatagtagggatgactagttttttggggctcggcctaagtggtggggtgacttcgtaaagccctgttgcaaaaagtagggtaaggacgaacagacctaatagaatgaagggatgtattaggctcataagggttattactgttcttcagaaatacgagtgagtttaagggaagtgggggagagtacttgcgacttccaggaggaagaggagggattaggctggctgtccgatggacacagctttattctggaatggtgaacccagtggggaggatcctgcaggcggacggcagtcggggtactatagatgactaagtagggtccggtccattgaggttatagagtttgaggggtcagattcttaacaagaactgatcgtccagctaggttgtcttcatatggctggggatctggagtaggcaagagaagattagcagcctggcgaatttcctgtctagcctgctagagcactggaagatagtagcctagagggctggtgtctgggatgaggttggggccaagcaagaaagtgcgtccatataaaagttcaaatggactgtaccctgtagcatctcggggacaggctctgactctgagaagagcaagaggtaaaagtactgtccaatcctttttaagttggaggctgagcttggtgaggtgtgccttttaaaagaccattagtccgttctacctttcctgaagattgaggacggtaaggggtatgaaggttccactgaataccaagagcctgagaaactgctttggtgatttggctagtaaaggctggtccgttatcagactgtatagaggtgggaaggccaaaccggggaattatgtctgacagaagggaagaaatgaccgtggtggccttctcagacccggtaggaaaggcctctacttattttgagggcctctaacagtattaaagcagcggcagccgctgcacacagacatgagggctaggttaaaacagtaaggtcaagttgtttggacagaaaggctacagggtgtggtcttggctcttgtgtaaaaattctgaccgtgctaaccatgcctaggaaggaaaggagttgttctgtagaaggtgcttgggtttgagagattagtcggacaggattggcagggagagcacgtgtgtttttatgagaattatgccgaaataggtaacagatgaggaagaaatttgggcttgattgaagtaatgggggctgtctgtgaagctttgcagcagtacagcctaggtaatttgctgagcttgatgggtgtcagggtcagtccaagtgaaagtgaagagaggctgggattaagggtgcaaaggaatagtaaagaaggcatgtttgagatctagaacacgataatgggttgtagaggcaggtattgaggataggagagtatatgggtttggcaccacagggtgtataggcaaaacaatttggttgataaggtgcagatcctgaactaacttgtaaggcttgtctggttttaggacaggtaaaatgggggaattgtaaggagagtttataggctttaaaaggccatgctgtagcaggcgggtgataacaggctttaatcctttcaaagcatgctgtgaggtgggatattggcattgagtggggtaagggtgattaggttttaatgagatggtaaggggtgcatgatcggtcaccaaggagggagtagaggtatcttatacttgtgagttaaggtggggggatagaagaggaggatgcaaaggaggctttggattgggaagaagggcggcaatgagatatagctgtagtccaggaatagtcagggaagcagataatttagttaaagtgtctcagcctaataagggaactgggcaggtggggataactaaaaaggagtgcttaaaagagtattgtctaagttggcaccagagttggggagttttaagaggtttagaagcctggccatcaatacccacaacagttatggaggcaagggaaacaggcccttgaaaagagggtaatgtggagtgggtagcctccgtattgattaagaaggggacgggcttaccttccattgtgagagttacccgaagctcggcgtccgtgatggtctagggggcttccgaggcgatcgggcagtgtcagtcttcagcccctaagccgagaagatctgggaaggagtcagagagccttgggccagagttccaggggctctgggagtggctgccaggtgagttgaacagtccgattttcagtggggtcccacacagatgggacgcggcttaggaggaatcccgggctgcgggcattccttggcccagtggccagatttccagcacgtgtagcaagctcctgggggaggaggttctggaggaatgcctggccgctgcggttcaggcgtttggaagttcttgtgtgctggagatgtggctggggtttgtctcacagtggaggcaaggaattgcaacttttttctattatggtacaccttgaaggcgaggttaattaaatcctgttgtggggtttgcgggctggaatttaatttttggagttttatttaatgtcgggagcagattgggtaataaaatgtattttgagaataagacggccttttgaccttttagggtctagggctgtaaagtgtctcagtgttgctgccaaacaagtcatgaactgggctggatttttatatttgatgaaaaacagcctaaacgctatctgatttgggataaagaaaaaggagcattaaccttgactatgcctttagctccagccacctttttaagagtaaattgctgggcaggtgggggagggctagtcacggaacgaaactgtaagccggaccaggtgtgaggaggggaggtgataaaaagattatagggtggaggagcagaggctgaggaagaattgggacctagctcggcctggcgaggaacaacctggggaggaagggagaggtcagatgggtctgtagaaaaggaagattagaaagactcagcgatgcttggggttggtactgaggggacaggcaggagggaaagaaggaagatttgggatgagtttaactggtcacagagactaggaagggactgatgtgtaaaagaatgcctggatgtcaggcacctcaggccatttgcctattttatgacaagaattatttagattttgcaggttggaaaaattcaaagtgccattttctggctatttggaactactgtcgagtttgtattggggtcaagtggcattgcagaagaaaataaggcatttaggttttaggtcaggtgtgagttgaagaggttttaagttcttaaggacacaggctaaaggagaagaaggaggaatggagggtggaaggttgcccatagtgaaggaggcaaaccctgagaaaagagagcatagagacacggaggaggggagtggggttcttgccctccagaaaagcagagagggggttgggacacggaaataagggattggggcacagagataagaggtcagggtgcggaaataagggattggggcacagagataagaggttggggtgcggaaataagcgattgggggtttcttgccccctaggaaagcgggacttgccgctaagggtgaaggagaaggggttgaggggtacttgcccctgccccaggaaagcgggacttggcgctaagggtgaaggaccaaggcaggtgtccctgcgtggtctgacacccttgaaacgtgagtgtataatcagagaggtgtccctgcaatgattaaacaccaagggaaggctgccttcccagtctgtgaccagcgccggagttttgagttcacggataaaacatgtctcttttgtctctaccagaaaatgaaaggaattgaaattaagagaagggagagattgaagtgtggcaccaagattgaaaggagaaagcggttgagggatagtgagggaggttggagaagagagtaaaaaaggccgcttaccggatttgaaattggtgagatgtttcttgggctggtcggtctgaggacctgaggtcgtaggtggatctttctcacagagcaaagagcaggaggacaggggattgatctcccaagggaggtcccccgatccgagtcacagcaccaaatttcatgcgcgtccgtgtgaagagaccaccaaacaggctttgtgtgagcaataaagctgtttatttcacctgggtgcaggtgggctgagtccgaaaagagagtcagcgaagggagataagggtggggccgttttataggatttgggtaggtaaaggaaaattacagtcaaagggggtttgttctctggcaggtaggagtgggggttgcaaggtgctcagtgggggtgctttttgagccaggatgagccaggagaaggactttcacgaggtaatgtcatcagttaaggcaaggactggccatttacacttcttttgtggtggaatgtcatcagttaaggtggggcaggacatattcacttcttttgtgattctttagttacttcaggccatctgggcgtatacgtgcaggtcacaggggatgcgatggcttggcttgggctcagaggcctgacacaggacttgtgggaatataatccatggctgtttgactactctgaactgttatactgctgtttttctgcccagggggatgttaaagccaaaagcaagtaatcaacaagattttttttaatcttaaaatactgaattaagccttaacctttaaaacaatttttgttgtagacatagatttgctatttgtttcagacatcctttaggcttttgatctagcacatgactaccccttcttaccgcattgcccctggatcccccaaggagagacacatggctacctcctttgtaccttggcccttgctgtactgatcacagctagttaggacagctatgaaagcctgctccatgcagaactgattctgttcgcatgagaatttggaattggaatttagagctaaccagttggtctgtgtttgtcctgaacataacataaaaattaattgaaatgagagacagagagaggtgtattgttgtgggggcgggtgagaaagtagggtgagggaagggaaggagggaatgctgaagtatagagcagagagcagcagagaggtgagaaacaggaaaacattcctcaaagcttctccactcccagtccaggaatcttgcctagccttgagttacagaacacactgttatctctggataatacatttcctattttgctcaaagtcctggtgtgaatatgcaaccagagatttttaacgtaaaaagaagctatgagcatatgaatggaagttgaagacctgagaatggactaagggactcagggttagggacagaccctaggaggaaagatggcattcagagatagatagttaaaaaacaatcaagaaaaagtagccagataagtaggtgaagaactgcttgacaatcaaggaaagattggtgaattaggtaatattcatttgcataaaatgttgcccagtggtcaggtaggcgaaaagctgaatataggcagttagattttaccatttttatgtttctatcccctgctacctgactaaactattttcaaaatgtattttatagcttagagccttcccaaaattcctagtattatatataaatttccaatacatattgatagctgaacaatcatattttcctggggtttattttaataatatatgcatttattttagccaatgatattcacaaagctttgctgaaatgtgttttgtttaacttggttctgtatatttttccatgaaaagccatactaaaaggacattttccaagtattaaaaaaaaaagcaaaaaaccctgcagtccagaatgcataatttgttctgggatagttaaaattctaagagaagtcttctttgttctttccttgctctttctttgttctccaaaagggtcgtatttaaactatgggtcatttctcatctgaatagccagggaagattagctacattgctactgatgcacttgatattttctcattacataacatgtggccacagattctagccagtctgataagataaaatgttcataatacttagaagataaaagggaatcatcactacttaagatccctttaaatccaatctgttgatctgtatgagattacatttttggctctcatttactagttccccctaaagaaagtcttgatatagctactgggttcctggcttgtattttgatagtcaaaacggcagtctggatatttttctactcagtagatacaatagaagaccaaagcttcttgcattgtagtcactgaccttgccatgtcatttcatattttctgtagatttggtcctggaaaatcaaatattaagcaagtttgacagttcagctaaattccataaggtcatctatcacattacatacagtaattgattttacgttaattggtctttagtttcatggttcatgtttctggttttctggtagtttccagaaactttcgtgttaaatgaagagctatgctatgtaaataaaattcagtaaaacttccctttcattttaattatgtgcttttgaaaactaattttattgggttctttaaaaaactccgtaggagtcaggcatgaattttctactctttagggcatttcaatcatgaaagaaagaaccatctatatttttcatcatctcaaaacaattttagaccactactatttgtaggtacaaataatgttcattgatttgctttatatttattaatcacctaatagttatgaaatggtgccctaagtactgtgactaaaaaataaatattagtaagttaattttactaatttttatccttaggagctttaatttatgctagataatatctgagaaaaagtcaatagtatgatgctgtttaaagaaagaaagcaactgctatcctgtgttgttgtattagcagaattgtcaaggataaaataaataaggtgaagattagactccacttggcaatctttagcccttgattggagtaccatgttccatttgggaaggcacacttattacaacatagacaagtttggcagaggtttcaaaagaaagcaacaaaaaaatgatgaagggccttgaaaatggggcctgtaagaaaaggctgagagacgtgagaatgttcaatcttgaggaaaaaaggcagaggggacacatgataactgtttacagatgcgtaaagaggtgttatggagagaagagggacctatttttctcattagtcaacaaagacacttcaagaagtaatgggtttaaaacacgtggggggaaattcaggttaattattagattaagttaggtaaaatttaaatatttaaaatgttatgattccaagcataattaggctgtggagactaaatcacattagaattggcataggaaagtgagatgaaaacaaattcaatctgaatgcagagggttaattattgcaagtttatatttgcattaaatgttatcatatttcaaaatactttcacatatattgttttactgatctctggacattcttaggaaagagagagtgtatcagctagttttacagctgagaaaatggaatttcagagaggcaaaatgttgcttcgaacccccacactccagattagatagacaaaactgctaagtgcataggattagacaagcaggactaaaagccaactcttcacattttctgtcaatatgtttcacatggtaccttgctatcttttcatttgtaatatgatttctattgtggagaaatattgtttacatagaggaacaagaaacatgattgaacttatatctgcattacctatatctattatttatctctcactactcacaattgtgaaataaactcagcactttggtattatattttgacaaatcattgccaaacgtaatacaatctccagttggtatgatgtggtgagaccctaccttctaccattacctagaggtggagacacatttcatcttttatgaatttcatattcctcatctgtaggaagaaaattataatatcttctggtttcttctagttttacaataaggagtgaatgagaaaatacctgtagaagtacctgaacttgttcaaagaaataaacttgttcaaagcataaactttgcttggggggaaatgtgtgttgtttttggtgtactgtggattttgataatccctttccagttttattttcaatcctaccttttttttttttttcatttcctaatttcagattcctgaggtcaaggccaatgtctttgttgaagcacttaaaatttgctagtctaatgtaggtgttcagtaatagttggtgggtgactgagttaacaaatggatgaataaatactttcagttggatattatgtctgggatatgagcaagaggtgataaatgccatatataatcatcttgttatactcctttatgtaatgatgtatgtttaaagtattttatagaaacatggtatgccagattctcagttagatcctgagaatacaagccactcaaagtctaaaggggttttgcagaccactccaatgctaggtatagacaaaactcttcccagcaaagcaaggtagctgatgccaaaatgttaccaaggaaagacccattggttggttgccaagacccttatggagtctgagaagatgttttagactccctcaaccatgcacacaaattgtgtaaagtaatccaggaggcagcctaaatggaaaggctgttagtatgctgagcttgctaggaaatggaggaattttacggaaaatgtcagcctctgtagactcctgtgatgctcgctagggtgccagccttccccagggagcccacagcacctggcaggcagactgcagcagggagtctcactgggaggatacaaaagagcttaatggccccctgtgcataatgttgaaagaggctgcaatttttgttttcttcggagattaacgtgtgtgtattgcaggttcaaaatggtaagaatcttaattagagttgcaggaagttgcataatatactccatgtcttactttttccgcacaccaaataacagaatctatttgccaaattatgaaggttgatggagaatgaaaactgtaatttgagtaaatgggagccctgcccccattttttccagttagtcacaaagtttaaaatgcaaagaagtaaatctcccaagggagcaattctatttcatctgtggaagaaagacatatgttgttactgatgaaacctctgttgtgaaagcagagccaatgctgggaaaaacttgaaggaaaaactagctgagagccctctgtctcaggagcctgtggcctttgggtccacccagggctgcctgtgcctcttcctgaggcttttcttgaaggcctgctctttcctctgattaccttagggcaattgcctgcctctcttaagagaaaatgtacctgttttgtgccacatcccttcaggcccctgagctggacagtagattgatctgacagatgtcactttgatattaaatcaatagtaccaatatgtttctgggttttcctggccttagcaaggttttatgttcacttacttagagacattctggagaatatctcagaactcaaaacatgagatcaaattggagttctatgggagagaggatattgaattacttggctttattatggctgcactcatagggccagccacgtgtaaaagtttcattctctttttttgaacaaatatttattgaaaacaataaattaccaagaactgtgttaaaatatacagatgtctaagcagacacggcacaatctatggccctaagaagtctaggaggtacaatattttatataaattattcatcttcattcaaagttatttattgagcatctactatgtgccgtgcactgtgcatgcccctggaaagcataagagacaaaattcctttctttgtgggagctgtattctagtgaggttcagcaggtgaacagcaatccgtgttaattatttcttcttccactgaaatgaaaattctatgtttctaaaaaatattataaaagtactcttcaaacctcatattaagaaagtcaaattgtctttagccacatttgataaggattaaagataatcttactattttattttaaacatatttagagcagtccttgtctgaaggaagcttgtgttgaattttttataaagtgagttaattaccttctaattaattttgtgtgtgtgtagtgctcacctaacacaagattttcatgctgaatttgctcccccaaaagaaaaacaattcctatatatgttgtaaagggtcgcaagtcagaactgagatggaggcaatacaaatatataaccagcggcctcagacaagttcccaaaattgggaagaatgaagagatagggaatgactgcagagcctttttcaggaaagcatgagattggaagatgaatgctcaagtaaattagaactcaggaaaagtactgaacagcaggatcatatcatcaaaaatctggctgataggttttgaactcactgaactgaatctatttagaagtacattttgggaagactaaataaacatcaacactatggtctattctaattcaggctcttgctttgtctattttccaggtgataaaacactgattgttattagtgttatcatcaagcatattgagcagtcaatctgtaagttaatagcaatacacagccatatagtcctggaactagaaggaaagaaaatgaattttttcttttttttttttctttttttttctgtagaggggaagaaaaattcaacaccttgagtcagctgcgactcaagggtccattataacttcgagatttttaacagcctgtgcctagggtatgggagatgaattttgttccaaagtggtgacatgggcagatataaacccctgggagcaatttcaggcaagttgagagtccattctaaacaaaaatggacagaatgtggaagatggaattcccacacttgctttctgaccttggctgatattcctcagcagttggtaattagaggaaatactgaagctgagaggatgaaagaataaagaagagtagaataatcagaattgaaagaatgtaaataagtaataagatggggcaaaaacaggaatggtgtcactgacaaaggtggccacactttgcagtaagatgtgagtgggacatagaaactagatttggttgagtaagaggaaaaccatatatacacacacatatatatacacacacacacacacacacacacattaatatatgcatatttaaaaatatatacatttcaaaagctcatttatgttgaatactaagtgggaaattcatcagctgtttggcttcctgtctgttttattctttgccattgcagacttgagttgtcttcctgaaatctttctgggagataactgcatgcccagcccttttctttcatcagaaaaagggtattctgccctgagtcagaagcagggggaaaatagatgataatatctacatgttattgctagaacagagtcaaataaaaattaaaagtccatcaagtgatcaggttgaagtcaataaaaaggtcaataaaaagcaaggatgagccaaaaaagaggacttggtgtactggaaaatgccaggaaaaataaaagacagaaaaaacactgtggcaagatcttctcctgtggcctcagggaagtgcatgataaaattaattgaagcttatcacccatgaaaaagggctacagttggagcaatagctgcacggactacataacagtacaggttctttagcctaagacaaagataacagatttttgttttacttttgcaagcttttttaatatactgagttaaaactctctttttttgcctttattcaactgaatgctgcattttttgagcaatactaagtgttgattggcttacttgaacagcaatttgttaagaggcctgctgtgtaccggccattatcctaaataccagtgtacaaagattagtgatgtgtctatctgctttcaaaactcttataatctgtagcaacatgagattaatttttacatatggtttatatataacaatctaattccaatacaatcatatcattctccatatctcataagaaattgttttgggacattatttaaagaaaactttatacaataaatctataaattgttagtagatttgactcctcctttagatgaaagttttcatcttgtcgtttttttaaattcaaaatatgttattttaagttgatataaaacaatcatattagcaaaatgcatccacattgaaaacttagctggatgggtaaagatcgctctattaaactgtgatgtttaatactgagtgtcaacttgattggatttaaggatacaaagtactgatcctgggtgtgtctgtgagggtgttgccaaaggagattaatatttgagtcagtgggctgagaaagccagaccgacccttaatctgggtgggcacaatcaaatcagctgccggtttggctagaatataagcaggcagaaaaaggtgaaaagagagactggcctagcctcccagcctgcatctttctcctgggctggatgctttctgcccttgaatattggactccaagttcttcagttttgggacttggactggctctccttgctcctcggtctgcaggcggcctgttgggaaccctgtgatcatgagttaataaactcttttacatgatattctcatgatagtgaataaatttcatgagatctgatgggtttatcacgggtttctgcttttgcttcctcctcatttttcacttgctgccaccacgtaagaagtgcctttcacctcccaccatgattctgaggcctccccagccatgtagtactgtaagtccaattaaatctctttttattcccagttttgggtatgtctttatcagcagcgtgaaaacaaactaatacaggcactgttccatctccaaatggtcataatttatcagttcaaaggaacgtactttgcatgccaccaaagggttttctaagaattgggtcagcaattttaagtcaaggttgttggttctgagttgtacctttgagtcagtctttcagcattttagttctcaaatctagttttctactctttccaatggggttattcatccaatagacatgggaaaatcatcctaatcaaaacaaatttatgatcatttctctctggcatgactgcatcaggtagcttaaaccatagaagtttattgtctcacaattctgaaggctagaagttcgagaaaaagatatcagcaggattgatatcttctgaggggctgtgaggaagaatctgttccatggttcacccagcttctggtggtttgctggcaatctttgatgttccttttgcagtgtcaccccattctctgccttcgttgtcacatggcattttctttgcatgcacatctgtctcttcatatggtgtttcttttataaagacaccagtcatactacagtagggcctcaccctaccccattgtgacttcattttaatttattacatctgcaaaatccctatttccaaataaggtcatattctgaggtatgagtgggttggactacagcatatgaattttggggagacataattcaatccattataatcatactgcataactgacgagaaagtaaagaatcaatctgatgcaggaaagataacctaatcaaaaagaggaattaaacaactccaactaattccttacatttaatctatttaatataaaattataattttgcaaacacagcatggtgcactatggtaactaaagcaattggatgatatttcaaaagctttaataactagtatttaatcacagatgctgtgtgtttttacctgaaattcatcctggtaatgcaacataattaattgcacaatttattttagcatgagttttcttatatttatagagatagcatagcaatcttgttttcaaatttccctcagaatgcttgagatcagacattattagcatggagacaatagtttcattgtcaactcctgctggtttgggtacatttacagtaataaccacaatccactagcttgaattattgttcaacattctatgtgacttcatgagggtattaatatgcaagagagttatttgatactaatcaaagatacacatttgtcttcacacttattacaatatggtaaggtaatcacataaaatacttaagatggtagacttcatacatatatatatatatacttttaatgaatatactaaagctaaccgttaatggaagctttgacagaaactcattgttcaatatccaagcaaatcaattttggactataaatgcagaattctaacaagcaaaaattctaatcattcattttatttttctgttattcgtggcttcttatattgttaaggcttaacatattaagatgcacataggatttaatcttcatgagagagcaatgaatacatcattgaatacataccaatcatgtgtaattgttttcatatgtatgtaagcccagcggaaaagagtcgttcattgacagtactcattttcccatttggtgtattttcctaattgtacagtataacagttatagtaaatggttataaatattaccctttagctgtaacatctatgacatttttgttgatcatgataatatgtgattgtttagtcaactgagtttattgtaattgagattggaaatcactataagagtgaaattgaatatatagatagagaaataggataagttaatatggcagctcaacactgaacacagactacaacttcttgaccaccgaaatatgcaaaatattatataatagcttgtatctggacagcgtgctaagctgttcacttgttctttatcatttaatcctcttttcaaatatgtgagatatgttctgagaagataagcaccttgttgagtcatacaggtaatacattttaaaggaggaatttatatacacttaagattgtgtgtgtgtgtgtgtgtgtgtgtatgtgtgtgtgtgagagagagagagagagagagagagagagagagtttcaggctccaagacagatattaatggtagactgcctttgttgcataactgtagcagtggtgtacaactgctactcccatcttctcagtacttcatctctttctttgaatcaactacagctattctgatggctagattatgatctgccagtttgagaatccaactcttgctggccagagacttacagttaaaaaataaatcatttagagtcatatgcttatgtactactgggctgtgatcctcaccctaaagctcactttggcatagctctttacttgccatcgattcttgacagccttatttcagaattcttacagacacagtgtctatttaattttaatacaatcaagcaatggtttctggacatatttggctatttctttgaaaacaatggaatctgtcttatgggcaaaatgacttttttctgccctaaatgctgacactgaattgcgttcaatcatgacagaatttgtgcaatatgaaaagtttgtccactgggtggacaatttctatctagcatttttctctccttcagggatggactttaagttgatttgacaaaattggtttcatatgaacccaaatgcaaaccctatattatctttaaacactggtttctgtgaagttgtttgattaaactaatactgttgactccctgttttctgttttatttctttaagatgacatcccttattctgttctgctacctgggacattgctcttctctccatattaattaattaatattgtttcctaaatctgtcttcctagtctctgtgtttgtcttcaccatgtgtattgggatatattctcgaagggtttcatgtgtgaattccctcttgagtcaaattgtacatgtaatttcccttcattttaaaaataaataagaaatatgagaagaattttcaaaacttttatgttctatatgctttcctctggtttggaaattaatctctgaatttatttatattttaggtattgcaatttgagaattagaagagttgtttttacaaaacacagaaaacagcttttgttttaattatttttcccagtgtgtctaagagtcaaaaagactctgtattagtattcactggcaaacagaacacaatgcagagcagatatcctagaagcaacatgatagatccaatcatccgattcattatagtacaaatattgtaatcaatcataatattcagtgttccataaatccacaattctgtgaaagggataagaaaaaagaaattaagctatcagtgagtttactaaaaaaggaaaagagatttcctgattatcatcattcagaattagtcagacatatacatggtaatcattcatattttaagcaataaaaggaaactcaacacaaagcctggaaagcaacagccttttatttttattttctctaagatgtgaaaaaatagacctaggtgctaatttaattcccttttaagttaatgacataatgggtttgtggagcattaaatagggaataaatatggccttacatttccatgtcggagctaaatgctttctcttccctcagcttctaattcctcagctgagggaagtgatcagcagtcaacgatcacaatgagggagctacgcacacatcctctggtttcctgagctttggaacacttaatgcttagtgcagcttctctattttgagttctaccatgaacccctctctgatgactcccacatatgtcttttttatgtaagcacaccaagttcagctatccctgtaggtagacagcatttgagacttctcagttgggtatgatttgagaagataatggagctgatcctcttgacataaactagcctattggtcctgcccaaactggtgttccctggaacagaggcctaaaaacaaaatatatttaaaatgttcaaatatatttagaaaatattgtgttaaatcaagttagccagatttttgttgctttcattgtcatttttgttaatattgttgcatgatttccagaatattcagtatgcaaataaatattcattatgaatttaacaaaataggtattttctaaacttctttgaccttggaactcttgttctcccttcccaaccccaccattgcacttattttaacattgcactcagcagggctatacgcatcaacattttgggaatttgaggatgaagatatgtttttcctattaaaaatgaattcttatcccactgggaaagaaaacacattaagcttttatcagtctttaacattttaacatggattagccattctgctctttctggattataagcagctgagagcaggctttcattatagggagagggaaagatgatctgaagtgtcatgtgtccccagagaggattttcaagtggaatgccaccatgagagttcctgggctagcagaggacaacttcatatagtgcagggttgcagcaaggccactgacaccagctgtatatagaaagttatgtttgcctcagtttcttcagccaaaacagaggaaatttactagatagtagctatctccctcttagctctaacaatacaatctgattatcttgatggctaagtgtgggaactgagagagttagaagagtgggggtcactagttgaaaaagcaaggttagaaatgaatgttttctcagtcatggctggcctagggctggctctgcaggagttcatgattctcatctccccaaacaacaaagagccatggaaaattcatcagataacagtaattcaacagataacagtataaagactatacatatttttaagatagatttaaaaaatgcatgacatatttctggcctccaatgagtgttcagtatgaaaaaataccaactagatgaataagtataggcaagcaaaagattctaagtataagaaagtgtgaaaagtaaaatttattttatttttctttgaaagagcagtcttcccaggtcaagagattagaaagacaagtaaggtaatgcctcttctctgaagtttagaacagatgaaagtgacacataaaagcagaataagataaatattatatcatagtaaaaggaatgagaggttgtatgtagagtggttgtggacttggactcaagagcatgtggacacaaatttctaggttaaattccctggattcagaacccatttctaccatcttactaggtctgtgtcctcttgtgtaaatggtagtggtgatgataattaccatgcctttctgctagaactattattaggaggattaaagaaaattaatatgtataaagcatctagaagagtgcctcacataaaataacaaacataagtatttactatcattaataataaattatatccaactagaatcattataaggggttttagaaaagaagtagcaataagataataagtgaagaatgagtaaatttttgaagctacaaatggattgaacatagtactctagggagagggacaatcatgaatgaatacatcaagatgaaaagtcaaagggtaaattttagaaatagcaaatagattggtttgctaatataacatactggccctttactgatcatgttgatcattttgtgagaaaacagtaggaaatgacttcagaaagaatatagtttggtaaaaaccattttaactgtaggagaatgaaactggattctcatctctcaccttatacaaatatcaactcaagatggatcaaggacttaaatcaaagatctgaactaaaaattctagaagataacattggaaaaacccttctaggcattggtttaggcaaggatttcatgaccaagagctcagaagcaaatgcagtaaaaacaaagataaatagatggaacttaaccaaactaaagagcttttgcacagcaaaaggaatagccagcagaacaaacagaaaacccacagagtgggataaaatcttcaaaatctatccatctgacaaaggactaatatccagaacctacaacaaagtcaaacaaattagcaagaaaaaaatgaacaatcccatcaaaaagtgggctaaggacataaatagacagatctcaaaagaggatatacagtggccaacagacatattaaaaacatgctcaacatcgctaatgatagagaaatgcaaatcaaaaccacgacacagtaccaccttactcctgcaagaatggccataatcaaaaaaataaaaaaataatagatgttgaagtcgatgaggtgaacagggagcatttcttcaccgctagtgagaatgtaaactagtacaaccactatggaaaacagtgtggagattccttacagaactaaaactaccattagatccaggaatctcactcctgggcatctacccagaggaaaagaagttattatatgaaaaagatacttgcacacacatgtttatagcggcacaaatcacaattgcaaaaatatggaatcaacccaaatgcccttcaatcaatgtgtggaaaaagaaaccactgtatatatatatacgtgatatatattgcatatatatatgtgtgtatatgtatagtatagatatatgtatatatatagtatatatacacatgatatataatgtgtattatatattatatattatatataatatatataaatatatattttatatatataaatatatatgatggaatactactcagccatacaaaggaattagttaatagcattcacagtgacctggatgagattggagattattatcctaagtgaagcaactcaggaatggaaaaccaaacatcatatatgctcactcaaaagtgggagctaagttatgataatgcaaaggcataagaataacacaatggactttggtgactcagggggaaagggtgggaaggcagtgagggataaaagactacaaatagggtacagtttatactgcttgggtgatgggtgcaccaaaatttcacaaatcaccactaaagaacttactcatgtaaccaaacaccacctgtgcccagtaacccgtggaaataaaaaataaaagaaatttttgcccaaaccaatgtcctggagtgtttctccagtgttttcttctagtagtttcatactttctggtcttacatttgagtctttaacctatttaaatttgatttttgtttatggcaagagatagcattctagttttattcttctgcatatgtatatccagttttcccagcatcatttattaatgagactgtattctccctaaggtatgttgttcacacttttgtcaaaactgcattggctgtaaatatgcagatttatttctgggttctttattctgttcttttggtctatgtgtctgtttttatgccagtaccatgttgttttggttactatagctgtgtagtataatttgaagtcaggtaatgtgatgcttccagctttgttattttttgctcaggatgtcttggactgttctaggtctttcgtggttccatatacattttaggattttttttcgatttttataaagaacttcattagtatttcgatagggattgcattgaatctataaattactttgggtagtatggacattttagcagttactgattcttttaatacatgaacatagaaaatgtttttatttttcatatctttttcaatttctttcatcaatgttgtattgtttttattttagagatttttcacttctttagtttattccaggtattttattttatttgtggcgattacaaatgggattactttaattatttctttttcagattgtttgctgttagcatacagaaatgctactgatttgagggaaactcttctacactgttggtgggaatgcaaattagtatagccgctacgaagaacagtgcagaagttccttaaaaaagcaaaaacagaatggccatatgacccagcaatcccactgctgggtatttatccaaaagaaaaacatcagtatatcaaagagatatttacactctcatgtttatttcaacactagtcataatagccaagatatggagtcaaactaagtgtccatcaatggatgaatgaataaagaaaatgtggtacatattcatgatgaaatattcagccattaaaaaagaataaaatccagtcgtttgcagcagcttggatagaactgaaggacattatgttaagtgaaataagctaggcacagaaagacacatattgcatgttctccctcataggtgagaactaaaaaaattgatctcatggagacagagagtataatgatagttatcagagcctggggaaggaaatggggagggggataaagaagtgttcggtaatgggtaatgggaacggaagtacaattagatagaaggaataggatctaatgtttggtaacaaaatagtgtgactataattaacaataatttattgtatatttgaaaataactagaagagtggaattggagtgttcccaacacaaagaaatgatgcttgcttggggtgatgcatatcccaattatcctgatttgatcattatacattgtatgcatttgtcaaaatttcacgtgtggcccataaatatctacaactattaagtaaccatgaaaattaaaaattttacaatttaagaaaagttaacttgacgagaaaaagaatacagtttggaagtcttcgaggatagataggaagagattttccatttaatttggttttaaatgggatcttgtctatgtttgctcagggtaatcatatgaaaggcattataatttgaaagcttaatctcaaaatagtactttttttggtaaccagttgtcttgcagcaaaaacaaaagcactgaacttgggtcaaaatacgtgaattcaaatccatactttataccttcagaatcaaacactctaagcctcattgcgttactctttaaaataaggaaagtgcatctaaattacacattgtttttagtagcaaataagttagatgaaaaagcatcaaatgtaatgttgggcatacataaattttcaatcaacttttaactatataatattatctgaacaagacaagtgaagaatacaattgtaattttttaaattgcaaggcaacagtttctaccctaataatatctacattttcctcataaaagtcagtgcatcagattctatacagtatgctcttcaaattcttggctccaaagttagcaaattaaacatcccatctcatttctagtttgcagtgaaattctcaaaaagtttccagaatccctgatgttactcatcctgagctacatctgacttctaatcagcatcttttacttagaatacagatagcaaatctggttggcagttattttccaatgattcttctgccatactgatgctttataatggctccaaggaaaggccattctacaaataaaagcaaaattaataaaagaatgcgggataattgacagttttgctacaacagcatttaatttgaatcctttgaaacttactcttcactcattgatttttaggctcacaaattctttgtgtgaattctctcttttacttttgcattgtgaaatgatttatcatttgggtaattttccagaattacactttattattttgtaaatggcatgcagcacagatggatattagcaaggtctctgtataaacgccagcaatagaggtggtaacattgccctgagagttttctcctgaaacaaatcaaataaagaagagaaagcattgccaaagctggccatgacagaggaagtggatccaataatagacatctcgatggatacatatatatgattcaatattgtgtgacctttactttcaaactcactttcagaaaatatattctaaaggggtgccaaggatattgctgtctactctctactgacttccatgaaaggaaacaccattcctctgtatctcagtcatcaatgagtacatttatgaaagagtttggccattgtcaattctaatgccgttaagaagaacttgagcatagcttacatttttttcctcattttactcctacttgtatattgctttggcatatactattagtgcaatgctgtgacttccaaaacttctcagaaagtaacaacttggactgttaagagactccagcatttgaaatatattttaatgcaaactgtctccctgaagacctctatccatagctaagatagttgtatccgaaagctttgcgcttacttctttgcagtgctatttgtaaacattggcatagtaagagtgataaatttctatggaatcatctttatcaaacatacattatagaagtagaacttattccagctaaccacattatcatgaatagcattttccatatttctttgaaacaatacaatagaaacaatattatcttaaacattaagtatccccattgattggtccagtgaaatactgcttggaatgaaggcttcaactttaaatctatttaatcaaatttggtaaaacaatcatggatcaaatatattattaatgttacgtggcttttattattattattattattgcaaaaattaggagccttggtttttgtggccttattctatttcagttagatataatatctcctggccttgggtgctttttacatacaaatggggtaaaatagttattataaagaatagagattgaatagatgtgcttagagtaatgtctgacacaaagcaagcactcggcccagcacagtggctcatgcctgtaatcccagcactttgggaggccaaggcaggcagatcacgaggtcaggagttcaagaccagcctggccagcatggtgaaatgctgtctctactaaaaatacaaaaaattagccaggcatagtgccatgcacctgtaatcccagttacccgggaggctgatacaggaaaattgcttgaacttgggaggtggaggtagcactgagctgagatcccgccattgcactccaacctgggtgacagagcaagacctcatctcaaaaaaaacaaaaacaaaacaacaacaacaaaaaaagcaacggctgttaattgccaggaagaagagctcctacaattgtttcatgtgcatttaggcactctcttccatgtgagaccccaagcagtcagcaggactatcaaaggaacccttttaagacttagatatctatttttaattcttgcactgcatttctactttgataaggggaaaaggcattaaaacacatttttgaaatgtaaatttccaaagttacaaaaattaacccaacacatcatatgctctttgaatcacttaaattggcagctgtcttataatgataaaagacctacggcgttcttagatgatgtctacatgatgccagacagctaattgaattaaggaattaaggaagatatcaactagtccttccccttatttgccagatgaagaaatggaggccaagaaatgtgtagtgatttatttacatcaggggttgagtctgttggtcgtgagaacttctagcctagttattttttccaccccatctatctgtcctgaaatttggtttcttattgctgcagcattgaagagatggaaccactaaaaaaatactgataaaaagatgtttatccagaggcaactttaatggcaactcaaactatttgaaatatgatggaaaatttgttactgagtgaaaaggccatcgcacaatcaaaattgatgtttaaagctcgcctactaactcttccacactatccaatgtagtggtcctccttcattttgctctttagagtttccctaattttctttatgcatgcatctgatttcatcttactttagagaaaatactaacagtgtatgtctagaacatggcagattggagccttatagcacgagaggcagggaaaagacagctaatagcgattcactgataggagaagaaggggtcccatattgtttgagttttagataacgtttaatgatcttcctggataacagattctatgaggattttttttttttgcttgtttaaataaaagctgattcaatgataacaaaaggagagacagtaacttcagaaaaatatagatatgctaattcttacatttgtagagcccttttgatattaaggttcaagatctaaaaatgtaattctcattcaagaccgtataaaaattgttagttctatataagcatattgaatcactgatagattaaagcacattcatcatactctagaaaacaaggaaatgtgtaatatatttgatgtcatttttattacaattgttaaaatagtgaagaataaacctgttaactagaaatctatgcatgcagaatgtcttattacctaaataacaccagataaatgaggtgttactgtccacagtctcacaacagagacatgaaaaacccttctttacactggtaacccttaattaaactgaatttttggtgtgtcccttcaggagaaggtcaccatatcagcaataattaggggaaatggcattgtgaacattactggatgagatgtggtgtatttcttactttcaattattgcctccttgtttgaatcattagcatttggcagatttgttgctgaatttgttgttctgatttaaaactcggtgtaaggttgaatatgttcttatcttgatcttatatttctgccatgacttgcatttcttgctgagtttctgacttgaattgctctatgtttttgctgagcttttgctttgtcttgttgtatttctatctggaggggtttccctccgcctttttctttttgttatatctcttctttggcctattgtatttctctggcccattcattagctttttttttcctttaaagttattctcttgttcagtatatgcagtacctaatcaatacgcttccttgcttgctgcaggatttccaacttactgtgttttctgtcagctttgatactgcctgagaggggtttctgtgctttggctaatatattgttgtctgaattcgcagtgttttcagctcattacactgactttaattttgatgtatttgtattttatccagttcaagtcatgtttctttcctctgtcaatttaattactttctgcctgggcaacattgtgtttatacaattgctgctaaagcgacaaaaggtttctatttaaattaccacccagagcatcagcaattcagcctaaaaaatatgcagaactcctctgattgatgtcttacctttctgtggataaggaaatctagtctattgagaggatcttctttatagaacatagtcaagcctggtttatagctgtagagtcattaacagaggagatgagtgtagggctatggggtcactgtatgacttctctgtaagaaaaaaatgtatgactaggttctattcagtacaagtcatgtcctaacagcaggaaaaagaaaactttcttaggtgtttaacttatatttaggtgggctacccaagctccagctcttatttttctatgtgttatatatattatacacatttctgggtttgaatcttgttctttctaataattttgcattgggctgtgtaagtcaggaacattgaatttccattgtgtacataaaactatagcaactggtctaaaaacaaataatgtgggaaacatagtaactgttcctgttttcaaaggcttacaataatgcgaaaaaaagggaaaagcttatgagcaatacatctttgaaaacagaaacagtgaaaacactccagtaaatacataattggttattaatagaattttaaattggagaggcataacaattgcaacagctcttggaaatgcttaggaaactgaggcttataggtttacccgaacatatgtcatagataacattaatcaactagctgatgaacatgaccagcaaatgcattgattgcctgatcagcaaatgcttcaactgttttgttttacaagacttaatatgtttaaacaacaacttactctttacctactttttaaaaatatccttctgtattttctgcaacaaaccattgttgagtccctgtgcttaacaaaactgtgcaactgtgctatttacccagaggaagaagaaagatttttttaagtcagttcttttctggtaagtgtaacttttctagtattggataatctttctgagcctcagttttcttatctgtataattggcataaatgaaccatgagaaacaaataaaatgacatattcagctcagtgtgtgtcacatggtgagagacccattaagtttgctcttttccttttgcctttctcttttcagtgttcagtcattatactgtcaaataaattggagtttctggcttttctcacactcaagattattatgatatactacactagtacatctgaccttgataaaaagcaattttctatagtttaattgtatagcaataggatgggaaagtctctgattctcactctgtagcttcttcttcccagggctggagtcatttaatctctacctttaggctcattctaccctggtcccttgggtcatgaattcatctggaagattcagacttatgctttaaggctctcagaaactcaatcttgcagaagaatctggcctccattttgtacacactttgttcaaagagcctcctagcaccttcccaagacccacatataccactcccattttctctcttggttctggtgattgactctctttatgttcttggaaagctgcctagtatcctaaaaccagtattgctgcctggctgttaccaggctgcaccctcgactaaagttgatcccctgcactcatctttggactctagatttctattacatgcacatcccttgtgccaaattatgctggcttgtctggccttccaagtttcacctattgttatgcttatttgtcagttcaagtctctattccagctctatcccacttccttctttctttagcctgtgtccctctcttggatccctgaaacattttgagtactagctactcctatgtcctgcccatgtgattaagaatgatacttttctcccgtgcttgcagctgggtagtcatactccatacccacccaggtaaaaatgtctggatccaaatctacctttcataacagatctgatgtgctattctagacagctttactccatgatatattgcagactttatgtaggttaacaaagcattatggtgtcattcttgtgacagccctacattttcattatgatttttgtgtttgcggtcctttttgtgacaatttcttttagatgaaaatgcttttaatgaagcccttttggtacttgggagcctcactggaatggatttagtacaaacttgccttatttcaaatttatgttcaatattgaacaacactgttacccatatttaggacagtagacaggtaaaggttgcagaatttttatgaaatataaagcaatatccactgttataatgaagcactacataaaattgtataatacgtgagtttcttattcctcaaatagtctaactgattgttcattgggctcactcagccaaaagtagagggaaactttgtacagacatcattagtttttctccatttagagattaatcatgaagagctctggctctttaattctgtaatttgtatatttaatgggctgctgcagaatctatgacagtaattagcatagcctgaaaactcattaatacgcaacaacatgattaatgcagcattaatgcaaacatgactgaagttatttgggttatgtagtaagaagattaaagctaaaatgtcctgtttgttttaccagtggtgagtataatagagtggcaaaaaaataaaataaaaacaggtatcaaattagctgtttaaaaaaaagaaaaaaaccagcaaaatttaaatcaaggtgattttatttttcccttaggtctaaaatttgggatataagttatgttctttacttttatatttattcatttattcataaatttatcattactgaaggaaagttcattcaaccttttagtttaacatagttaaccttttagcagctttaacataatattattagtcttacattggaaacaattttaaattgtactaatctttgaccaatacattacacatttctgttttgaaactaatatatattattggctatgccaaataattaaaggatttgttcctacttattcagaagttacatattatgccctcttctcactgtgttcacctcttaaataaatgttcaaatactttataaaatactaccataaaactcatttttttaaacaaaactatcaaatatgacatgttaaatactgaaataatcaataatgtttggggatgtaaaagtatataagttttgcttgttcttgctgtctcatgtaatcatattgaagtcctctcattcttacttttttttggcttttcttttttgagacggagtctcactgtgtcgcccagactgcagtgcagtggcgccatctcggctcactgcaatctccacctcccgggttcaagcgattctcctgctcagcttcctgagtagttgggactacaggtgcccgccaccatgcccggctaatttttgtatttttagtggagacgaggccgggtgcggtggctcgcccttgtggtcctagcactttgggaggccgaggcgggtggatcatgaggtcaggagttcgagaccagcctggccaagatggtgaaaccccgtctctgctaacaatgcaagagattagctgggcgctgtggcgggagcctgtagtcccagctactcgggaggctgaggcaggagaatggcgtgaacccgggaggcggagcttgcagtgagctgagatcgcgccattgcactccagcctgggtgacagagcgagactccatcgctaaataaataaataaatacataaataatacagacggggtttcaccgtgttggccaggctggcctcaatctcctgacctcagatgatccatccaccttggcctcccaaagtgatgggattacaggcgtgagccacagtgcccagccattttttttttttttttttttttttttttttttgctatttagtatgacctgttttaatagcggtcctaaactttaaatgacttatttttcaatcttatagtcaaatgtcaagagtcattaatagtatctcaaacaaaacttgcattttaaggttaagcaatcctggatgactgaaaaaaatatgtatctgcttttttgtacttattttattctaaatccacattagaaaaatgtttatgattttattctttttcaataaaaaaaaacaagtgaatatccacgaagtacctgactcttggctaggtgttgaggaggaaaagcaaacccatcaatgtctgtgcacttggaaataaccatctgggagaagagaagctcctttcaacctagggatgtctatagataagaatgaaattgcaccatagaaagaaagcatatcaacattgcctgctaccaacagatggcactgttaatggtttgtatcacaactgtatttgtgggaccaatagatttgctaacattctcagaaggtagtctggaaggagaagagcctctgttaaggcagtgaaatgatatacatgctcaattttgtttaattatcttgtcaaaattcctggaaaaaaataaaaaaatatatttatatgggatatttcgtttaattaaaatacatcatcttttaccaaaattaatatatgtgaaattaaattgtagtagaactttaaaacaacatagagttcctattgctttgaataattggtctttacatttagtattatattatatgttatattgttatgtataccatatatataatgttatattatatactgtaatattagagtagcaactgatactcacaaagctaaacaactcagttccactgaaatataccagattttgacttagttttaaaagggaggacctagaaacagagagaaaatgcatcagtgggtaaaatcatttacctctaatgttttatttcacctctatggtttttagtgtactagagagctgtttaatcagaccattaccaaattgaataaatggctacttagtgattactgaactatttagtgatggggttggggagaactccttttttaaaaataagccttttgaatagttcatataagaccatcctaataaataaaatggaacagaatgtgtttgccatgtaatagcttagtgatttttaatttctgtattgtgatgaaacaaccagcttttctagaatgtagccagtcctttgtttctcagaagctgtgcacacttgcggcattcagtcctagtgctgccataacagagtttctaaacactagttcagaaatgagacatttttgtttagtctctgtttgggcacagccaagagtttaagactgtacatggagagaaacttgcttttttctgtggatgtaatccaggggacctgttgaggtctttaatgggtggctgacaggatgaactgggcattcaatattaaagggtggtatcatagcaagggggttaccccagcagagtttgtagatcaggaattgtttagagcctagatcttgggaaagtgaacaagaagcatgttaactaaagataaaaaacagaaaccaggtattgtctttttaaactctgagctcttggagtggcgatcatgtcttttccatattagtatctccagtgatgagcattgtctgttggagacactcaatatacatttcttgaatagagtaaggatttactggactttgacacagaactaaggttctgtgtgatagaggtctgtgtgcttatgagaagctggactgtgtaggtgaggatgctaaggctcctgttcccatagagaagtccttgagatggctcaagctgctggttcccttttttcttggactttgcaggtattcaaggtgtctctagttagaagctttatgttttgtaatgggtaaaaatagtgctaaaatatatagctctttgctatttataccaaattgagggtctctcagaacaaatacagtggacggattttaataataatagctaatacttatatagggccaaatagttctgagtacttttcatgtatttaactcatttaatcctcccaaaagacttgtgaaagaagaaactctcgttgcccacttctagaggaggatattaggtgtagaaaagttaaacgatttgtccaaagttacatataaattaagtgcagaagctagtttttgaaagcttggctctagcatttgttttttaatcattaagccaaacatcaaattccccttcccacactttttttttcacttttaccaaagaaatatcttaacaaaatgactcctttggaggaggaatacatgcatatatatatctgtgtatacatgcatatatatatctatatatgtgtatacatgcatatatatatctgtgtgtgtatatatatatctgtgtatatatatatacatatatatatgtgtgtctgtgtgtgtatgtgtgtctgtgtttctgtgtgtatatgaggtcagagtgagggccaagaagctattttttctctaaagtggttcatatattgcaagtgatttaattgagggaagatatagttgtattagctaaaacacttaaaagtttataaataggtgtgtctacacaaaggcaaacattcctctaatttctaaacagtttttacttctattgaattgaatatgcctaatattttagtgtcctgatgattaaagtatgaggaatgaattaataaccaggttcaaatatgtgtattgttaccatgcagatctgttaatacttattaattcccacatcagtgtgaactaaggaaaatgaaattaagttgcattaagaatgtgctcagttatatataaagatttacttcctgtaagagtgattatataattatatggtttactaaaatagttatgagattttattctttcattcatttgacatgcattattggaatcttagtattttcaaactacgtatttggagataaatattgcagtctgaccataatgatagtttaggtattccttggcctggaaggaggacactagttcattttattaacatgttctttgtctgtggagagcctccacaatgccattttagtaaaatactggatctttactaaaccatggctaccaaagacaaagtgtcattctaggcagccaacagacttcttgccctactcctgacaagcaaaataaaatagcctggggtaagagaggtaatggccatgagttaagtcattttcatagttatgctaaatcagcttccctcaggagcacccccttcctttcctttctctgtttaaatgaggtggagtatgatgtgactattccagcacactcaaaattagatgtgtgatcaagtattgatcttcaggaagttcctaatcctgtctgatgttttctgtgttagctttttttttccttctgtcataatgttagattagccagcaccttcattttgttattcccttactttttaaggcaggattcttctgtacaagaaccctgaagcgaccctaatattgtatccaaaatgtagggtcagaatcaggagtggagactgtgagttcattgtgagttaacagtctattatttaaaagtgcaacaagaaaaatagttttgctttcattccatttctgggactctaattttttccaagggagtctggcataaagtatcgtattggtccaattgcttgggatccactgagattgttactagagagggctttggtgtaaaaccccagagtaaaattctttaatgtccttttgggtcattgaacactttctaccattatgcttgacatggacaccattgaaatcattccaaggtcaaggtcactcagcaattttactaatgcttcaagttagtggaattttatttttccccccataatgcttgttttacaaaataaaatacagtatattttagtagatattgtaagatcaatttttgaaatttcttttatcaaaataaatataaattttatgaagtatctgtatgtttattatatgtaaacgtgcaattacaaatatgaaatataatttatatacatgtatctatgcatgcacctggatcttatttgaggtataaaacatgaaactagaactaatgtgttttacaaatatacgtaaaaagttattatttttttaattttatagaaacacagagtaagtaatgataaaaattcatttgtattaaaaatatttttataactacaattagtactaacattttgctttagcctaagcttaaatgctttatttgctagagtcacttgttaaaatactaaaaattttacaaggtatgaaggtaaaatagaaattatttcaaaaaaacaaaaatgcatgctgaattttctcttttcctttataaaacaagcaagtcctttatgtagatttctacaattcataattcaatgtcattaaatggcattcaatttatattttagactattatgatttcaatttgagacacaattgttttccaaatgaattcaatgtggggtatatttatgtaatagatgaaatgtatttcatctattttggaattgaataaattcaatttattcaattgtttggaattgaataaatacagtacgtataaagggaggatgaaaatgtacaactattggatgttgatagaagcattctgaataagaagcatttttacaataaactcaagtatatttttataatgtactttttaataatacactgattttaaaagtcttttttataatgtactttcatatattttttcttgagaaatcttgatcttgtattgacaattgcataaatatatttgtgcccagcacaatggcttacgcctgtaatcctagcactttgggaagctgaagagggagaattgcttagtccaggagttctagaccagcctgggcactgtggtgagaccctgtttctacaaaaaagtcttttaaaaattagctgggtgtgatggcacatgcttgtagtcccagctactcaggaggctgaggtgggagaattgctgaggattgtttgagttcaggaggtcaatgatgcagtgagctatgatcacgccactacactcaagccttacaacagagaaagaccttgtctcaaacaaaacaaaacaaaacaaaacaaaacaaaacaaaaataaataaatatcttggtatgtaagggcaatttggggttgataatttggagagggatggaaagatacatagatgcctatatctacatagatagagctctctctatacatacggatacagatataaatagatatctatatgcagatagatatatatctatgaaaatacacatctaaataaccatagatatctattaatatctatgtatctgtatctatctatacattttaacttaaaactttatatacacataagcctatagttctatatttgtagctaagtttaaaaagctattcaagggaagccctgagttgttcttttatggcatctggtggcatttcatatttgacgtgttggttgctattggtgtttgcactggtgaatccttccactggaaatttcatttcttcagggtttaccaatcacctaaaatgttttctttctggataatatcccctgactgctttcttcctcttttagcctaaagtttcctaaaaatttaaaatgcattgtagtcagctttacttacctttcacagaatagcaactcaagaagtgtatgctaagaggaggaataaaattatgtaaaaaatgaactagaaacatagttacctaagacaaaaataataagtggacaaaccaagagtaaacattttacttaagggtttaaaaatgatatcaatttttactagttagggacaatgaataatgcttatcacctccactgttatttagtgttgttctggatgatataacccatgtgtaatgacagaaaaaagaattatggctgttgaaaaggaatagatgaaatttccagaaaataagtttatacctaaaaaagccatcaaaacctattataaataacagaagtacaataagatggttagctataaataaatacataaaaataaatattttttccataattcagcaataacaaatctgaaaatgatctgattcttaatatcaattaaatatataataagtactatagcttaacaagaaatgtgcaggatctatttaaggaaaagagaaaagaagaacttataataatcattttaatacaaaagagtgaattagttgataggtagctaaaagcagaattttaaaaatttactaaaaaaagcaattttgtaagtaaatttgtaagtaagaaagaaaactggaatatatccctatctcactttacatgtcaaaataaattacaaattttatatttaatactttattttttccagaaaattaaatataaaaatacagaaaatgaacagaaaaaatataagtaagttacaaattctgggctaggaagcccaattataaaaagcaaaggaagacgccattattgaaaacatttagattttaaaacaaaaataaaccccctttttacatttaaaaataacatttaaaagtcaattgttaaaaaaaagtaaatgactttaacaagtgacagacaaagaaaccatacccttaatgtggaaaaaacgcttacagatcaataataaggatgcacaaatgacaaaaaagtatccaaatgaagaactacgatgaaagttcaaaatcactattcatcttgtaaatacaaattaaaactagaataagatttcattttaaatctatcgaatactagttggcgtctttcagaaatgccaggccaaactattcctgatgctagaaatgttttgcctgacagtggctgaaaactatttataacatatggaaaggaaattacacaacttgagaaatttcttgcagtgaactcagaaatgaaaaggcggttagatgacaatttcagttcattaatttataaattcacatgctaccacagattttagagatcatgcaattcagtatctccatttaagagtaggaatctatgggctattctgctcaggaaatcagcactatagcatgtatatgtatttcataaagtatctggtggatattactttcttgttttgtttttttttttttttttttatcatttggaggttgtaaagcatgatcagtccttataagggtcacatttagacagctacagattttaatcgttccaaggaaggaatgggggattatttcaaaagacgaaagaaaacattctttgatctaaaagcagaaccaccatttgacccagcaatcccattactgggtatatacccagaagaatataaatcattctaccctaaggacacatgctcgcgggtgttcattgcagcactatttacaatagcaaagacatagaatcaacctaaatgcccatcaatgacagactagataaagaaaatgtggtacatatacagcatgagataccatgcaaacatgaaaaaaaacaagatcatgtcttttgcaggaacatagagctggaggccattaccgttagcaaactaatgcaggaacagaaatctaaatactgcacattctcacttataagtgggagttaaataatgagaactcatgaacacaaaggaacaacagacactggggtctatctgagggtgaagggaggcagaagggagaggagcagaaaagataattattgggtattaggcttaattcttgtataatgaaatcatctgttcattgaacccccgtgacacaaattcatgtatgtaacaaaccttcacatgtaccccacaacctaaaataaaagtttttataaaacacatttctttgttttatacagaccagaatgaaatcatttctcaacacttcttttacattaaagcacattattcttgtttttttcctcaggtattgccctactttttaatcctaatctatagttccattgtaatttttagaatgctaatctaatatttattgaattcttttgtagtaagcaactgaaaaaaatttaattttcaaaaggaagaaaaaatacatgtttaaataataagataacacaactttggtattctaaggaatgtttggggattcattccagggcgctcatattttcaggttagctttcaactgttattttgtcgagtataatcaatggagattttgttattcatgtatttatagagctggttagccataaatagtttatgaatggagacatttctagcaccacctaatggcagtcaagtaaaaagaaaaagtttttctaatttaggaactgttttgcataatttaaattaaactatatagccagagttacttccatatgaaaatgaacttttacattccctaatgcactaactaggcatggaaatccatctctgagcaattggattgagtaggaatgaagctgaagggatatttgataatgaaaccaaggggtttctgctgtctttatgtgtgcaagaataagaaaatacctagctaatagaataaattaattttatgtgaaaattttctttttagtttcagaagcctatgcatactagattttccatactgtagtttcctgaaaaaagtatattttgagtattgtattggcatattttatttgtcttgtttttcagcagttatttatacatctttgaccaatttattctactagtttaataaagcgttttttaaagtttctgatagtttttttaaactgagtcatatcattctgattataatattggaattttctgttgaatatgagtcaaagaacatgctttagatccgtaagctctactcatttatttcatgtgtttcctagcaggatttgaagaatgtgttgtctgtcataaccctaggattgagatcaatggatttggttaatgtatccgaaggagaaggagaacttagcgatagcagcagattctgacacctttcatcctcgtctcaacactttggtttgatactttcttctatgatataaacagggaatactaggcagactgcagatacaggtagttttttgtttgtttatttgtttgtttgtttttgagatggagtctcactcagtcacccaggctagagtgcagtggcacgatctcggctcactgcaacctccaacctccgcctccaggattcaagtgtttaccttgccgcaacctcctgagtagctgggattacaagtgtgccaacgagcccaactaatttttgtatttttggtagagatggggtttcaccatgttggctaggctagtctcaaactcctgacctaaagtgatccgcttgccttgacctcccaaagtgctgggattacaggcgtgagccaccatgcccggccagatacaggtagttataaaaatcaacaagaaagagacagtctggtggtggtagtagtttcaagaaagtgctttctcttcgactgcaatttcttcctttctatgaacatttatttattgatgccctgtaatgcccttcacttctttgtgcacacactgaattttaattcagtcttcacagtcctgcttaaccatcacagcttctgtgaactttttctgtatatcattttgctctcatttcaacaaaattaatcacttttgctattttatagctgtagattacatatccctcttgtactgggtctttataatattttgtactcatttggatacaaatacttctactgctataggatgggtttcccttaaagtaagtattatgcctttcttgtttatctttattattcagagcaaacatgtattttggtgaaagcaaaggcaagttaatggaactgatgtatctttaagttattgtctactgtttattttctctagttttatgttttaatgtaggctgatgttttcatttcttcctttcattaatccatttctttattactgctaaaagttaactagtatttgttgttagttttttgttttcttttgttttagagacagggtctcactatgtcactatcttgcccaggctgtactcaaactccttggttcaagccatcctcctgccttggactcccaaatagctgagactataggcatatgacactgtgcctggctgggtttttgttttgttttgttttgttttgtttttgttatttttaacatcatatgatacttgattgacttttctaaacccgtggattaatatctgcttctaaagtaaaaaattgttaaccttgttattgaaagctagaaagagaaaatgtctggcttaaaggctatcctaaatttttgaaaaattcttatgagaatataatcatctatataaagggtacatttggaaaatacaggtatatctttaagaaagattcagaatttacaagaaaaaatattgaatatgaagatgattagacaattgaacaaatatgtagataaatacatcaatttttacaaaacatgaaatagcattaaaaagagaagaatttatcactgctatcacttatcactgttgcagaggtccgattaatgcagtaagaaataggagtttaaaagttggacataaattgatcagataattattattttctgataatatttcctgtaaaatccaagataatccactgaaaatatagaaccagttgaacaatctacaaattgactggagtcaagagaaatatatataaaacagttgcattcctgttctcacaaaattactcataaaataattagaaacttctgtttcaaattgggatgtagaacagtaagaaagaacttcgctttcatggtaacaacaagaaaaccagactaaagaaatatctttttctatgagtctgtcaaggagcaagcaatgcagaaaaccctggctgaattgaattttaggaagaaataagtgcttcataggtgatcagagtgctgtggcagcttccatatctgaggctaaacacttgttcagacagcggaggagtatgctattgtagatggggagaatttttaaggtcaaggggaaaccatccacccttagacaacaatgtagcctagtaagatgaaattagatctaaaagtctaaatgccaaagcaagtagctcagccccaggttacactattatcctccacacttgaattttgctaagataaagtcagttgaagaggccctagaagtggattcctatgaaattttgccatgattggattccagaattatgaataaatttaatccaaatatgagccaaaaatatttatagtcccagccaagtcccccgctagctcaaatgaggataagatccaaaaggtggcatcaccaatggttgaaggttgagctaaacacaagtgaactaaatacaattaaagcccaacttcagttctacataagtcagtagaaatgtatccacagattgccaaattactgtaattagaaagcaaagaatttaaagcaaatattgtaaacatttaaaaaaaattaaaggtaaaattcatataatggatgaaaagataaaatattttaagagataaatgatagctctaagaagaaataaaatggaaattctagatctgaaaagtataaatttacaataaaaactttattggataagtataatagcaaattggtcagtgcagaataaaagattaatgaatttaaacacatatcattatgaagtaaccaaagaaaaatgaagagaaaaataggttaaaaaataaacagatcgataacatgtggaataatatcaggagatttaacatacatggagatgtgggttccaggaagaagaaataggcagaaaaatatttgaagaaataactgttgctaaatattcaaatttgatgatgaaacaacctaaaaatgcaagaagctcaatgaattccaagtagaataagtataatatagccacatattgtatactcacagtccgattactaaaaaaaaaagattatggaaataaaaaccttaaaatcagctagagaaaaggaaaaaggcactacatagaagaaaacaatgaaatgaatgaaggctaacatttcatcaaaaataattgaggctagaagataatacaatatctttagaaactttaaaacaccaatctcaattctatattcagtgaacgtattattcaaaaataatttgaaagacatttttagattaaagaaagagttagtatatcatgaatagtcttgcattacaagaagtgctaaaaaaagttttaggctaaaaataccaataataactcaagtgtgaggaaaaaatgaaggaaaatggaaattaaaaatgtgaataaacagaaaatattattaaaaactcttttgaagacatttgattagtgaaaacaagaaattttaaacatattctgcagtttacaacatatataaaattaaactgtataaaaaatagtacaaataattggacaatggtaaatggaagtatgttgctgtaaggatcttatatgtgaagtagtataatgttaatttgtgatagtatgtgtgttaagaatgcatatgatgatccttagagagccattttaaaaagtctaaagtctacctagggagatgaaaaaggtagcaaaatggaatgttaaggtaactcctctaatccataacaaggtagggaaggcacagcaaagaagcaaacagcaaatgcaaaaaaaaaaaagaagaagaaagtaagaaaagagagaattcaaatagcaagatggtaaaattaagttaaaaacatattaataattatgttgaatataaatgcacataacacaacaatcaaaaagaatagattattaaactggctaaataagcaagacttacaaagggtgtacaagaaacacacttcaagtataaaaacataaaaagcttaaaagtaaaaggatggaaaaaataaaccatgaaacatttatcataagaaaatggtagtggcaatatttatatcagccaaaattacctttaagaccagtaatattactaaacagacattttataatgatagtcaattgattaagaagaaattatcctaaatgtgcttatatgtagtaatagagtttcaaaatacataaagcagaagtttacaaaccaaaggacaaaatagacaaattcccttctatatttcaagatttttaaatgactttcttagtacttaataaaagaagttgataaaaatctataaaaatacagaaaaatcaaacacactatcaacaaacttcagtgacagttattgtacattctatacaaaactggaaaatagctattgtttttcaaatgtacatggaaagtatgtatatttgaaagtatgtacactacaaacattctacagctaatatgctgggccataaaagaatcttaatatatttaaaaagttgaagtcagaatatattctctgtttatatagaattaaattagaaatcagtctgaaaatgctatctggaaattttctaaatacttcaaattaaacaacacatttctaaatgccctaccaattaaggggaattttttaacaaaaaataaagtataacatgaactttttggaatgcaccccaagtaaggcctggagagaaatgtataggttaaatggttatcttagaagaaaaaagtccaagctttcctaagcttcttcttaaaacaggcaaaaaagaacaaattaagaccaaagtaataagaaatgaaaaaaattaaggcagaattggatatcaatgaaatggaaacagaaagcaaagcccagaattgatttgcaagaattatgggtgttggggaatggagagtggtaaggggagagaaggaggggggagagagaaaaggagaggaagagagagaaaaaaatattttggattaattttaaaaatctatcgatatgatttaccacattaatagaggaaatagtatagcaaaatatcatattatctcaatacagctgaaagacatttcacaaaattttatacctattcataatgaaaactttcagcaaactaagaataggagagatgaaggaccactacaaatattctacagaatacatatacatatatatatatatagtatacatatatgaaatgtacactacaaatattctacagctaatatgctgggccgtaaaacaggcaaaatatatatacaatatatatttaatatatatttattatatatacttatacatacttaatatacttatatatttatatatataaatatataaaagtgaaatagtgcatgttttgattttaagatagggatcaagttttcgttcaaactttaccagtagttctagccactgctaaaacaatacgataatataaaagtcataaatatagaaaaggaaaagaaaatgtatttgtcatcgacataattttgtatgtaaatgctttaaaaaatctttgaaaaagtgttaaaactaataaatgaacttggaaagattgcagaatacaatgttaatataaacaaaattaattgaacatactagcaataaacaatttaaacaaagttggatttaaaagaatattcaaaacatagcacttaaatttaacaaaataaatgaaaatatttgtatagccaaagctataaaacataacttagaaaaatcaatgtaaacctaaatagatgaagatttatcatgtttgtggatgaaaaacaaaatattgttaaaatagccattttcctgaagtcaatttattcatttaatgtaattccaatcaaaattccagcaagcttttttgaagaaattcccaagttgattctacaagttgaaagacctagaatatccaaaatactattgaataaagtattaaaaaaatggcaaactgagccatcttatttcaagatttaaaataaagccataataattaagacttcatagtatttgtactggcaaattaatcagaaatagactcagacttccaatgtcaattaaaatttgatagaggtaaggcagttcaatggggcgagtacaatcttttcaacaaatagtactgtatagtgtataggagtcaaaaaaaaacaataaagcttgacccctatctcacatcatgcatacaatttaatttgagatgggttcatagacctaataaataaaagctgaaattataaagcttctagaagataaatgagaaaatatcttgatcatcttggtgttggtaaagatttctcagacaaggtacaaacaaagcgctaaccattaaaaaatggtaaattcaacttcatctaaaatattaagaaaatgattgccattctaactgatgtgagatggtatctcattatggttttgatttgcatttctctgatggccagtgatgaagagcattttttcatgtgtctgttggctgcataaatgtcttcttttgagaagtatgtgttcatatccttcgcccactttttgatggggttgtttgtttctttcttgtaaatttgtttgattctggatattagccctttgtcagatgagtagattgcaaaaaatttctcccattctgtaggttgcctgttcactctgatggtagtttcttttgctgtgcagaagctctttagtttaattagatcccatttgtcaattttggcttttgttgccattgctttttgtgttttagacatgaagtccttgcccatgcctatgtcctgaatggtattgcctaggttttcttctagggtttttatgcttttaggtctaacatttaagtctttaatccatcttgaattaatttttgtataaggtgtaaggaagggatccagtttcagctttctacatatggctagccagttttcccagcaccatttatttaatagtgaatcctttccccatttcttattttcgtcaggtttgtcaaagatcagatggttgtacatatgtggcattatttctgaaggctctgttctgttccattggtctatgtccaacaatgacagactggattaagaaaatgtggtgcatatacaccatgaaatactatgcagccataaaaaatgatgagttcatgtcctttgtagggacatggatgaagctggaaaccatcattctcagcaaactatcgcaaggacaaaaaaccaaacaccgcatgttctcactcataggtgggaattgaacaatgagaacacatggacacaggaaggggaacatcacacaccagggcctgttgtggggtggggggaggagggagggaaagcatttggagatatacctaatgtaaatgatgagttaatgggtgcagcacaccaacatgacacatatatgcatatgtaacaaacctgcacgttgtgcacatgtaccctaaaacttaaagtataaaaaaaaagaatcaaaactttaaattaaaaaaaaaatgaaaaggtaagtcaaagactggattcggctaggtatatgtttaacttagagaatgccaagcagttttccaaaatgattgtttaattttgcctttacattagcatgtatgagagtttccattgcatcacctattcagcagattttggtgtttttaatttgaccaattctagtgagtatggagatgtgtctcattgtagttttaatttgcagttcctggatgaatgatgacactgaacatctttctcatgagcaaatatggttatttgcatatcagaatttttagtcaagtgattgtttagacgttttgctcattttctattgggttgcttggctttttattgagttgtaggatttttttatgtattctacatgtccattgtaagaatttaaatttctgataaaagattaaaaaaatctatagtaactttttagcagctttttcattcatactagggacttgtattacaggttccttctcttgatttggattttggaaggcaaaattttcatcagctgaaatgtattagttcttgatttctttttgttcttacaatagctttgtatggctattacttgacaatttccaatcattttgaaatgtcttacattttcctgtatctgcaataacaaagttaagttgacagggataaaggcttttggatggctttttatgtttcttagttcaagagagacacatttggtttttgaaaaatgtttgtgttgaagtctaacatacatacagaaaagtgcaaaaagtagcagtgtgcaggttgacccatttttataacccggatagccttgtgtacccagcacccacagtacaaaatagaacactactgggcccccagtgggcctgccttgtgccctttctaaatcccagccaggattacctctatccagacttctaacatcatacgtggatttttgtctagttttgaacttgatataaatgggatcatacagtatatattcctgtgtacttagtatctcttacacaatccatgtttgtgagattcatgtatatagttgttcattctcattgctatatctgttgtttgtacagttgagtgacacgtgtgtatgtttcagtttgaaggtgtaatgaaaggtcttgctgtaaacatacttgtatatcttgtgaccctatgcatttgggtggggctggatgtagatccaggagtagaacggctggatgaaaacatacatatatcaaaagatacaagggtaacttttttgtttgtttttgagacggaatctcgttctgtcgcccaggctggagtgcagtggcgcgatctccactcactgcaagctccgcctttcgggttcacaccattctcctggctcagcctcccgagtagctgggactacaggcgcccgccacgacgcccggctaatttttttgtacttttagtagagacgaggtttcgccgtgttatccaggatggtctcggtctcctgacctcgtgatccgcctgcctcggcctcccaaagtgctgggattacaggcgtgagccactgtgcccggcccacaagtataacttaataaatactgtcagtttttaaaagaggttgtacgctccaactagtagtttatgaatgttgcatgtatagatattattacattatatattataaatttaacattttactttttaatttaatattatatataaaaatatatgtaatatatacgtgtgtgtatgtgtacatacacacatatacagtagttgcacatatttggctacactttgtgtttccttttcattttagccattctaatggatatttagtggtattgcatttcattttgcatttctcagatgactaatgataccgaccatctttttcatattttttttttctggctatgtatcttggtatcagatatatgtattgcaaatatctgctttcactatgtcatttgtcttttcattctcttattcataccttttgatagccaaaagttgttaattctaacatggtctaatttatcaacttttccctttatgttatagcttcacatttatcgtttaagaattctttgcctaatccatggccccgaacgtgtatgatttttatgattaaattttaaagttgtaaacctcttacttgaaagttaaatatttccatgtagaacttggatttttcatatttttagaatgttaggccatggatgtaagtttattttacacatctcatgtataccatttgtacaaagtatgtgttccttaaatatttcctgaatgaatgaatatagagatgcatgaaatgctctattgtttaaacactagaaaccaaaacactgaactttagaacatttcctgtctcattttttgaaaatcaaagtctaaatttcagaaagtgagaaaagtataattttcacttgtctgcccattttagtcagtgtttcagcttaacacaaacattaaaagcaaaaatattttggcactgctgggctctgatccacagctcttcttattcctgggcccaggatgataacacattcatgaggcagaggggaagacaagttcaactacacagctgtattaaaatttctgctctcctgcgcacaccgcatgtccactttcatttctttggccaacacaagtcacatcactaagcctaagtcaatagttgggaatctgtaaatacataatcttcttataggaaaagagagtgttaataattttgaatagttatgcatgttaccattctgtctcacggtagagtcagtaatgttttctttaaaatgttttatatgttaatcaaaatattatgtttatatttaaatgtattcttttttatttagttcatttaaagaattgattacatgatttcagcatttggctcaaaagatagaatttatctatatctatggcaataattaattgtcaagaatatgtttcagtgaacgtgtgcatttttaattttgtcatagattttgcacaaaagacattcattatttattttggcagtgtaaagagaaaaatgagaagattaaattatttggaaaatgctgtgggaaagtctcacatacaccatcaattccaattgcctttttttatactatagcttcccttcttaagaaattttccttgatctgtgtaaaatattatattttagttgcactagcagtgcattttctcatataagcataaaacttgaaaattaaataatatattttagaaaaacacacgaacttgcatatttcttaaatagtgcataatttttatgagattcccacgtatatcttgtctaaatattcctgtaattcttactgatttattttcattcatcagatttctcttgaattaaagacaagtagttgtcttcccagattgagcaattattgatatcttccaacacccaattccttgtttttattctcctctctactgccacatagatgactccaacacactggtagagagttttgctctcttcatgttccaaattatagcatttttgtgaaataacctcaagctgagtaattttataggaataggttttattataatatatgataccaaatatcacataaaaagtggtgacagaaagataagatttctcaagtagtgttactctgaaccataaggagagaagcttaagagaagaaaagagttggtagaaatataattgttctctgctcaggttgtagaccagactctacgtctatgtttctgctggtagatgcttccttttatctccctggtctaccctgataattaatttatatgtctcccatttctttctctatcagatttttctaattcgtgttctgtacccaccttctactcattcatttcctcagtccttatcacccagcagtcaagagtctgtccattctacttaactgaaaaagattatgtcattaccagctccgtaagtttttcttcagttctaattattctggacctattggaagtgtttacacagttaactaaccttgcctccttaaagttccctcctatctagatttccattttacaatattatcttgatctaactttattcttgcccttgtttttttcttttctgaaatgtggacatttccattaaaggctcttgttctttttctacaatctgtctcttagacatggcttttgataggtgattgccaatgtattttcctagcatcgtcttctcttctaagatttagtttctcatttccaaatggcaggcagagttttctgcatcataagttcagtatgcctaaaactaaagataattcctaaccccagatttccttccttatctgacatttctatttctgttattaatgccccattttcctcaataattggtgaaaagaatggaccattttgccccacaccatcacctcatatcaatatgtcttaatgtgcctttcctggtatgtatagagtttatcctttcaattactaattcagttacttgtctgtccttgtcttattctcccaaagcacagcactcacctcttttctgtgtagctaagttacgtctcctccctacatttcatcatgaattttgttgccttagtctcaattttgaaaatcctattcctgctctccactcaaattttaatttcttccattaatttatgggatatgtttcaaatgggtggctcaatcatttcagtgcacttaataggggagatgagagagaacaatacatctagtagcaggagtccaagtgtgtttgactactgaaaagcaatttgttggggcaaacaattctattctgtggagtggaagagttgccaggaaggactgcatcctgaatctgacagcaagaacacaacattcaagcaggccagagtaagagaagaagagagtgtgtaacaatgagaaataaaaatcactaggacaagtttgttgaaaatgaccaagagcataaaacgtagaagatggagatgcagaagtcaagaaggccaggataaatttgatttgccttcttggaaagtctaaagcttgtatcctaaacttaacctttgctgtgactaaaggaatagcactctaaaaatgacttagaacacagcattctttttcatctttgtcttctatacaaacttctcaagccagattgtacagatgtggtctcacctatttctccagatttatctaactgtctccctcacaaccagccttcctcaaactttccatacctctaggactttgtacaattcccgccaaatccttcatattctctaaaaacaagctgaagtactatattatctaaaactgtcctcaatttcttttaatcaggtattttgtatacatccctataccatttatcacattgcattacatttttttaattgtcttttttctcaactagaactcaatgtcagttatgggcttattagtttttcttctttgctgtgtatcggagtactattcaacaaatgttagtgttccatagatgtatgttgaaaaaacgacagtccaatgttcaccaaatgatatctgctttcctgccttcaaatcctagctaaagtttttctcttcagacatggcttctggagtagttgctgtctattgaaactgagttaaccaccacccacctatgtagggcttttggttaccagcccagcctgaaggaagatctccttcctttaaatttttattatcctgcctgactgtatttttactcaaatcagtattcattcattattcactattgtgttcttgagatgttatttgattttcatatatggtcttgagctcttatttgattccacaggataatttgttaagacatatacatttaatattttcaactaaactggaaattccttgaaaacagagattgtgtctcttaccagttttaatgcattaagcaaaaagccttatacagggcaagagctccacagtatgtgttgagtacgtgggatactgagtagagtggagatggggccatgtaatggtaggactggagatggggccatgtaatggtagggggaaggcatcattcataggactggagatggggccatgtaacggtagggggaaggcatcattcataggactggagatggggccatgtaatggtagggcgaaggcatcattcatagggctggagatggggacatgtaaaggtaggggggaggcatcattcataggactggagatggggccatgtaatggtaggggggtgacatcattcatagggctggagatggggacatgtaatggtagggagaaggcatcattcatagggctgttgcatattgcccctgcttcctaagctgtggaaatttctatgagaaaagagcattgtatatcctatgatatgcagggctagtatgtgctctgaagggtcagtaaagatcccaaaattctgaaggctgcaaaccatttggttatagggtggtgtttcaggaaattacctctataggcctcttcatggcaggtctttccaatattaacttctattactgaaccgattctttaaacttcataaatattttaagcaagaccctctgtgtttctttcactcttgtcaaaaacccatttatttttatgactctctgataatgttttcacattgatactctgagtatccaattttgggttgacaatatgtctttttgggttgatgagttttgcataaatttaaacttcattatatattgattagcaggaatgtgggcataagattccaagtactgaatggcatttaaaatgggatatatttaaaaccaaatggcctagaccatgcgagtatattgctgtgtataatttcctgactgtactcactacatcataaataataatgaaagtaaatgtacatttatcagaaagaatcaacaaaaccccagcactgatttgctgatcacacttgtcttaccaggcattaaggccagctttcgaacaaaagtgcctgaaggtttgattgtctttgcagcatcacctggcaatcaggaagagtattttgcacttcagttgaagaagggacgtctttattttctttttgatcctcaggtaaatgagaaatcataaactttaatatttttaagaatttagtaggtgcctggtactgaggtaaatgcttctgttttcacactgaatcttcattcaaaccttgtaaggtaagtactattattatccccattttgccaatcaagaaaatgaaacttacaaaagtaatgtgacttgccctcagctaaaatagcggagctaacttttaaaccatcatggtctgactgagaatctgtgggcttaacaaccaaaatgccaccttataatgaagattaaaacttttaaataaatttaaagagatctatttttatttttcttagtagcaaaaaatcatgtccccttttcttccttccctgtctttcttttttcattgtttcaccagcaaatatttaagtggctatcgggtactatggtactgggcgttgcagactaccatagtttcaaagttaaatatgaccatgcccctgcaaaggatacagtaaaataatcaatttaaaattcttataaattgtatcaaaataaagatttaggattctatgtattataggaacataaaataaagaaataaattgttttctgagttgtcaattttctctggaaatgtgatatttaactgagatacaaatcaatgaagaaaagttggtcaggacaagattatatgtctgtatttgagggtgtatatttcaggtggggcagtacaggggagattctgatctccacctgggaaggtgctgagcataaagtttccaggcaaagtgagcagcaaatattaaggaaatagcaaatattaagtgcctgaggtggacgagaacatggcacattcagtacactgagatgaatctcttatggctgggaacagagacaaagggaaaggtggtagattgaaaagctgggtagaaaccaagtcatttaagaccttgtaagcaaatgtgaggatatgaatttttcctaagggcagtgagaaagcactgaacagttgtcttcacttgagttgaacaaatatcagtgagcatttgatattaggtattgtattaagcatgtgagatgagtaagagaaatgagtaagactaagtaaaatatattagctttccattttctcagttcttcaacttaaaactgatgatctaaatcacacgttatgcttgacaaataaatgttttacattttattggtaaagcagacacaacgttcaccctctgtatccaagttgcgtctaggatcatggactgagtgatctgactgaggatctcagcctcatgaaccctggagatccattgaccttagagagaaaaggcagggcctattgtaccaagtgtatctgaggaccctgccagactcaaaaagcaggccaaagtcctcctgctttatgaagctgggagagccgcacagtggccactcgaaggaccagggacagaaaggctccctcctcatgacttgacagggctctgctaactccctggctggtgcacagcaggtcctcagacacaaagatttctgagcgtcccctagtaatgcagcttcttaaaggatgccagcaggtgggcagtgagtaagcaaaaggaaatagcatcacacctaagcagatcctgcagccagagggaaaggaagaagcagcagctatcgcagaaggcaagacagatggcaactgaaaaaaatttttaaaaaatcagctgaagttgattcaattacataatggaagatattattttttatttgaaaactttaagtagattaattagaggagagacactgagcctcagattagtaggtcagaagattaagttgaagaaatctctcaaaatacataaaaatgtgacaaaaacaagaaagttagatactactactgtcactaagaagcgaatcggaaggagaacaaaaagcacatgctcaagaaaaagagggataacataaaatgatgaaacaaaaaataggagagaatatctgatttaagagggaatttagtataaatccattgaaaagactcatcaatttcctgtcaagattaagcaaaactaatacttctatgagacctctttgtgccaggcattattctaagtggtctctctatacatcagtttgtacacttacatacacacatatgcctatacacacacacacacacacacacacctacacacgcacataaactcatttgaacttttcaacaactctgtgaggtagatactcttcatattcccattttacaggtgaggaatctgggccacaggtaagttaattttccccaagtcacaacactaataagtgaccaagccaggttataaacacaagcaattgagctccaaagaccatgattttagctacagtgctatactgcttttcaacatgaaagaaagatggttgttgatatccataaattcagaaaaaaaaaatccatctctgcaccaggttggaaagaaatatttcagtaagtaatctagccaaaaggaaaaataacagagtcagaaatataaaaagaagaagcatcagtgaataataaatctagtaatattaagttatgcctaaatatttaatgatagagtgactagaactctgttttacagtgccaaatgagaatctttgaaatagaagagaagtatagcaaaggcaagaaaaaaaacgtgaataatcatttgttgctaaaattagtaagatttgaaggagaggaaagatgagtgaattaaaagttctgaagataccagcttagtggcggggtgtgggtggaataagggaatagattatactgacgttttgttttcgttaaataaatagggcaaatgtttgatttcaaatgttatagaaaaataagttactactaataaaaagtgctcttcaggacatccaaattaacaaggttaaaaaggacagcaaatgctaagttaaaaaatcaacaaaaatcagaaaaagaaaggggagagtacagtaaaatagaagactgtcaatgagaaagaaaaatctggctctgctttttccccttcaacctgttagtatctggagatatttaagaagaagccagatggaaaaaaaactaatcacaggaccacttgtttatagagctttaaagtatacaaagtgagttcctgttaatgatctcatttcattcttgaagtagccccttgaggttgattttgttttcatccctgctttagatgaagtggcttaactacggtcatagagtggtttagggatagaactagcactgaattcaattatttgaatagcactgaattattttattcaatgaaactttgctaagaatttattggacttcacagttatgcactgggaacacagaaatgaacagaatgacactcattggaattctggccattggttgttcatcacagattttgagtatttatagccacccccctaccaaacatgggacagtcattggagaattaatccaaaaatgatttccccaagtctgaagcatgactgccatctcttttgacatgtggtgttgctatttctaaaggatgcgataccttaagactctgtaggataggagggtaaaggggtcaaactgcttaacggagaatggctgccaggaaactcatctggcaggtctagttgttttcatatcctttacggtgatcacctggacaggctggtgcaaagcgtggtaacagaattcagggaaacattcacagggcatttgcccatcatttccgcccccttacccttctcattcacacaattgcttagagtactcgtcactgctattagttttcccagttgctctgtccctaccctgtatagccaaaccctaagctgtatacatagtccgcaggtgccagccaagtattaataaaattgttaaagccactgggcgtggtggctcatgcctgtaatcctagcactttgggaggctgaggcgggtggatcacaaggtcaggagttcaagaccagcctggctaagatggtgaaaccccgtttctactaaaaatacaaaacttagctgggcgtggtggcaggtgcctgtaatccccgctactcgggagactgaggcagagaattgcttgaacccgggaggcagaggttacagtgagccgagactgagccactgcactccaacctgggtgacagagtgagaccttgtctcaaaaaaaaaaaaattgttaaagccaagttgggggctaaagggagtgaggaaggtttaatgatgtctagtaagtaaatttttatctgaaataatctctctccataaggtaaaactgcttgagttttcaggaaagtgacaattattttttaaaatacaagatatgggttgagcaggatggccttaggatctagctgagaaaatgtaatcagatgcattacactatgtgctcacgggccatgaggctctctatatatgaaacaacgagcttatgctagcaaggactgtgtccttccttacttccaatgaatttatactctaaaacaggtactaaacatattttctaaatttataatgaaagccccactcatttttagacaaagaagtgttaaaactgagggatggtgaaaattttgaatactcttctcttatttgctctctttttccaaagtaatatcaatgcagcttcttgtatgaagttagagctactctgggttttaaaaagtatagaagtttatttcatatgccttctattggcattacatttatttatattttaaatactttgggtaccactttaagtcagtttttctcctttaatctttaaatgcggacgagattatctagtgaatactttttatactcatcacacaagtaattatgtacttagtgtgtctgtcttatcagactgtatgatccagtgagggcaaagtctatgaatcttttgcccacaggtacttcctcaggacttagaacagtctttggaacatagtagatgcccagtaaataaatgaccattgacatattacctggctgattgactcaataactgttggtaggatactactactcataactgaagaaaattatccatttttctggcttacaacgtctagctttgtaatgattacacagatattttgtgatgtttgttttatttttttttattttgaaaaaattagagaaaaagtcttgctgttttgctcaggttggtcccgaactcctggcctcaagcaatcctcccaccttggcctctcaaagtgctaggattacagacatgagacaccatgcccagccttgttcaaatttgtctgtttttcagataatttgatttttatcaggaaaaaacgagatgcttatttttaaattgtttttactgaattcattcaaaatagccaaattttgaattatgaagagaatttcaaggaattttaaagtagttatctagcacatatttataaaataacttgaagtcattgtgtactttgctctttttaaaatatcttaataaaattgagtattaaattccttacaaaacaatttaatacaacgtagaggctatagatataaaaatgtatttggtttgtcatccaactatccgaagcattctattgaataaatgtttagggaaagggagattcttcatagtacataaaattggaaatgtgtttgtatattacaaactgggcacttgccattgttaaaagatacaataaagaaaagttaactgcaacttttaattacagtttttattgttatctccaacaattttctataattttcccattcttcacttaattaaattcaattttgaatatacttgatcagataatattttagtgaccagtaatgatctatgtttatcccttaaatattctatgttcagtgacattaacaggaaattcacatcatattctgggcttacttggaaggaagctgtgaaaatgaaagctttaaaacaattctgaatagcatctattgaatgtgtctgatatgttccaaatagaaagaacaacatgcataatatgacaccagaagtcatcacagaattgttctttcaacattgatggggggaagtaatcttaaaatagtcttcaaaaaatgatattctaaattgctgtaagtataaagtgagtttgtcatgctgaggctgtaggtaatgtacttgaatttgtctccaataaacttgatttctgatgtagagaactattaatgcttcagattgttgccaaacaaaatatgaagaaccacttattcagacacctgatctttagaatgcagcatcgtttgtaacaattttaacgctaactaagtacactttgatgagacagcatttaataaaatgctcattaatttcatcattagcaagggtatgctaagaagtaagccagtttcttatgtcacgcccaattagcatcccatgctagtaatcccattagtattgttgaattcactaatggaaaaactaatgggcatgctaccagggcacattaattgggcacgacaccagttctggttttaattattaaactacgataatgaaatgtgtgtttgtaaaatattaaaatgttgaaatagggttgaagaaaataaaagggtgtgtagacaaaacagatataaggaaagtcaacctacaaaaatacgaagactagaacttgccagatggtcatgtttctagctgatggagttgtctgtaaaagttgggatattgtccatgtgagagacaacccactcatactcatgggaaattaaaagctttttttttttttttttttactttggtaacatgaaattctgtatgtcatacatgttgtcgagctctttatgaggcccgacaggaaccaattaaatgtgtagagtggacatgttgtatcactgaagccatttcagagaaagataaacagaaatcatactaaagatggtatgattaacattgtatgtttttcaatatacatcttcagcaccattacatcaaacaattatctattttctctttttgaaaaaaacagcatagcaaaattattagagtttggtgaaattttctggtaattaagtgttttggtaatattttacccaatctaatttttttaatttttaaagattttattagaatgagctttattcttgttaagtaaatcaactttattaagaagaaaattcattcccatttagaagttgtaatttcttttttatttttatttaatagtagtactagtagctgttggtgacaaagttgggatatctttcacttagtcttattcacttaacacagaaaatgttactataggtaaccaaggctactataacatactggaaaattgtttacttttctcgaaagtagtgagatggcaggtgtttcttctatttctctttctcagtttttttttttattcttacctcctatttgctaaactctgttcttaatatctgccatttcctatgtcttatcacttaggaacatgtttttaactattatatgattaccttagccagaactataattattggattttaactacaaagcattgtgtactacatttaactccacccttatgtttaatgtatcacaactggctagtttttaaggtgaatgtcattcccatttgttattgataattttgtgaagataagagtgacttgtctgacatctctctatcttcagaactcattttgagtggtattttatgagttttaaatttttctcttctttttcatatttatgccatgaaacttaaagtctaaaattttagaatagaaaattctttacccttctgatgaatagctatattcatcagaaaatgcaagtgactttgtaagaaattcttactgcaaaggtgagacctttacagatctgtacactgtggtgcacagggaagtattaatacatcacaggaaagccagaatgatgctagacatcagctttaattttgagttctgtttgaaatgtatgcatgcttgtatcaggatcataatcttgaaacttgtaaattggtttataacaaatatgtgtgtgtttatttgtagatatgcatgtataaacatttatttattcattcattcccttaaggggtcaccagtggaagtaactacaactaatgatcatggcaaacaatatagtgatggaaaatggcatgaaataattgctattaggcatcaggcttttggccaaatcactctggatgggatatatacaggtaagtactttttgatatgtataaatagccctgttgatatgttggtgttgccatacttttctgttgtttatattcctacattcttatttcaccataatttctactcaattccatatatattgctgttgaatttgcctttgggatgctcctaaaaggatgaagtctggcaaccagtttttcatccatgaaggtctttggtaaagaaaaaaataacaatgaagtcacctatgtcttttacagttctttacaattcgtgtggacctttagttatgttctgtcatcttacttttgacttccaaaaaacacatacagtagaggaaagcagtttttgtctgcatttggagatgaggaaaccaaggctgagaaaaaagtaaatattttttcctaacttacacagttgagaggaagcattcttgggacacacatcctgttttttcacatttaagtttagtttttgctccagcctaccctatctgccacatttatgtaattataacatgatcactgtacctgtataatgatgcaggcttttattaaattattcaggaaatatctaattttaatcagtacctattatgttccaggtattgttctaggtgctctggatacaaggagcaaagagaatactgtaaaacttacattttatgggaggaatggggcagcaaaatacagaataaataaatttaaacaaatatcaagtggtgataaattctgagaatgaaaaagccagatgagagggaaagttgtgtgtgtatgtgcgtgtgtgtgttaagaaaggtctctctgatgaggtgacatttgagcagagacctaaagggacaaaggggaaaccatgtaaatatccaggaagaggatgctttgggttgcgaggacagcaagtatcagggccctgaagtgagagcacactacatgtggcatgtcaaggaccaacaagaaggccagtgtgggaaagagggtgtaaaagagctaatgacatgacataaggtcacagaggccattagggatcagattatatgggaccttgtgggcttttactttgaaagaaggaaactgttgaaggattttgagggaagaatgacataatatgacggctttctttaaaaggatcacactagctgctctgttgagaataaattttaaggggaatgagggtgaaggcatggagatcagttaataggcttctgcaataactctgtaataattcagacaagaaatcatggagacctgaaccagggtgataattgaagatataataagaagtattcagattctggttatactgtgaatgtcaaattaacaggatttggtgatgagattgaggcagaataggggttggtaaactatcaccatgggctaaatctagctcatgcctgtttttataaagttttattggagcacaactacacccattcatttacgtattatctatggctgcttgagtctgaatagtctacaaagacactgtctggcctttgacagagtttactggcccttaatgtcgagcaagcctgtcaggtttgggtctcaggcaactggaagaatgtagctgccaaaaccagggagtgcatgactgtgggagaagcaggtttggggagagacattcaaagttcagttgagaacatgttaaggctgagatttctaagacacccaaggggagatatcaggcaggctgctcaagaaacaagtctagttctgaagtcagaacttccagcaaaggatggtattgaaagccaagggaacagatgtaagtagggctaattggagtggattgggctctggaaaaacaaacacaaataactttgcctcttctctcaaagaaggtgggcattagaaatatgaacagggatttccattgttatgccacacagtcagagacccaggttcccctggcctttggccctggcagttcgtactggaacccagcccactattcatccctctagagtacttagggggtgcctatgggtagagaaaggaagaggcctgagaggcaggcggtctggatcattccaacatcatgatgctgggatgttgaggaagagccagtgaagaaaagtaatgaacaggcaatgaggagagaggaaaaccaagagagtggtatcccaaaggctggtgaaggattttattatttgctgagctagtaaaactagagtatcctggtgaaggtgtatttctcatctcctcttctctaggttcctctgccatcctgaatggtagtactgttattggagataacacaggagtctttctgggagggctcccgcgaagttataccatcctcaggaaggatcctggtgagtttagtaaggtatattatatgttgtcatccaaacttagaatagaacctgtttacattattttaaagtaagaataagtattatgttctacctcatgctatattttctatattaatgtgccaaaaatttcctttaggtctcttttttttaaaggaaccatgtattccatatgacttgtatttatattgttagtactcggttcttgatatataaaaggaattcattaaaacttttgctgaaatgaattataataatttcagtcaaaggtatgttattttaggacctatgcatagttttttctaagattttaaattgaatgtgaaacaacacagaaatggaaaactatgagcttgatttatactctaaatagggtgaagaacattccctgaatactatgtgataggcactaaaccaatccctagatattcatagatgaataaaatgtggtctttatcacaatagaggtcacaggcgtataaacagacaattccagcctaatgccattagtgctataattgagctatagacaaagtgattctcatatttttagaacaagagcataagaacatattctaaaatgaaactaattaaaatgaacatgaatggaattaaccttagataggaaaaaaaatcacccttcaaacgcaatgctaatattctaggattgtttcccaagtcctcattaagaatcacagggtgcctcccaagtctctcccaggaagttaaaatataactacataaatattacaaataagctagaacccagataagtataatttgttcatgggttgcagtctcagggaatcatgatgaagatcaaaaggaatagaaagtgttcatcaaatttaggagaaggatatagttgaatcctcaaggctgattatagttacctcctcagaaatgtctctagattagagagggttttcattcaactacttgagactgacagagaagtccctctaaaacacacacacacacacacacacacacacacactcacgtacacagcctttgttttttgcccttctgggaaatagtatcttcaggtactaggagagaataccctgatactaagtacccttcctgtagaggacacatctccattatgaataaccaattttactttgtctatgtaaattggccttataaaactctcataaactcaaagctgaaaactaagctttgcccccataggaaaggaggtggctgtgtgaaattcgacctcagtgcaccttctcctcctcttgatttttttttcttgctttttctctaattctctcatttgcacattttctctctcaaccttctgttatcaccctattcactgtatttataaagccacctctacctggtctggagagttccacattcaagatcaacactatatacatttcccaaaatatgaagccaaattattgatttacttcagtaacagactggttcatagatgaggaatctaaactgtaaactatatattaaatagaaacactcccttccaatctaacttttaaaattatagtactttatttttgaggctagtggcagatgaattttctgtgttagttgaaaaggcaatattcttgctactgcaaaaccaaggtttctgcataaacatctgtttctgcagatatgatgggtttgaaccagcactaaacattataattgctatcatttactatagctgatggtgtggtgtttacatgaatcattaagaggcttgcagtaaataggtagtgagagctagtgcctatttctttgactttaatggcacataaaattaattgcttgaaaataatctttcaaaatatatatttcttgatatctataaactcctgcagagataatccaaaaaggttttgtgggctgtctcaaggatgtacattttatgaagaattacaatccgtcagctatttgggaacctctggattggcagagttctgaagaacaaatcaacgtgtataacagctgggagggatgtcccgcttcattaaatgagggagctcagttcctaggagcaggtaatgctctaaaaaagacatgagtgttcacttaaaatctatgttctatcctttgtataatttaatctctcctgtttgattaacttgacctcatatgaacctagtatcacagaaatacttagttattccaatggtgcacacaaatatattcttgacatctgaatatgcaatataaattataagactcataagtatacatccatgtatgatatctctggtaactcatgcagttcttgatttacatatgttagcatcaccaatgtccatttgcaaatcagttgtttggaaactagaatgcagttagagaggtgtacttagaatgcactcagaaagatgtttcaaagagttttgtttactaggttaatccacaaatgcctatttatctcattatatagaagaacaatgttcttagttaattctcggctaggtaatgggttaagtaggccattgagagagaactggagactagaaccaccatccctgccattgctcaaaaggctacaatgaaaggggaggtgtaagtgtctgtagcttacccctgacatgcatgcacattgagtctctgcctgatcagagcagagacttccacccaggggaaggggagagggatgatggtggcttggtgcacccggcttgttcatcaaataaaagcccatcactgcctcctatatttacagctaagttggttggttattaagttgcttaaactgccttcagcacaaaaaggcatatgatattaataatataatctacacattttttattctgttttcatcaaggtcattctgagtttcttttagtcaatgcaaactacttattgttaatatttatctgaaacagtaataatcttacatgatacagacaacacatgatttagagagcaaatttcttcctgttaaaaagtataatatatatcaaagtctttcttagtatatcaaggtctttctgtcacttctgtgcaattacaaaaggaatttcttaacattgatttgcatcttcttttgtgagatttactcagtggcagactgtgtcctagagtttcttagcacccttacaatgctggcaatattgtgttacacatgctaatatgtacatatttttatctttaaagggttcctggaacttcatccatatatgtttcatggtggaatgaactttgagatttcctttaagttcagaactgaccaattaaatggattgcttcttttcgtttataacaaagatggacctgattttcttgctgtatgtgaattaatttgattaaaattactttaaaatataggacccaactttaaaataaataaaccatgtgttggcattacacttaattggggtttctttacaaattcacatttgttcattttttttcccagtcatttttagttttgaagtcctgtgaaacattttgtattttattatcctagtaattttttaagatgacaattgtaacaattataattttaagaaaacagactagatataaggaattaagaaaattcaatttagtatcttaagatatgaaaaacactatttccctcattatcttttgatatgagttttgaaagcatatatattatatatttttcatatgacatatagataatcaagtataataatatagtgaacactcctggacctaccaccacgcctgataactgaatattatcatttttggtctatctataaagtctttcctatcttgtttccatctcctttcagatgtcataggtaatcagaattttgtatttgttattcacatgcatttttatagtttgaacacctaatgaatgcctacaaattcttgcttttgaaatttataaaattggttttatactctctctttagcactcaacattgtttctgagtcatttatgtgtccacataggtatacattttcttggctgtgtagtatttctcttctcttaccaatgatgtattggttgttcccatgttttgcttcaatgaataagactgctataaacatttttatacatttctctaaatacaatgggcaactgtaactgcttttccttgtctttaatcattagtttgataccactgttaaatacgttattaaaattttaattcttaaaagttgttttaaagaactagcatagaaacaggagaaaaatatgaacatcttacccttagattcttgatttctaggcaaatagacaaatacaagtcttggcttttaagagtctaagatacgttcatctttttttttttttttttaacattcctagcatacacaatgccaatattgctaagaagggaaatggaaatttatcccttcatagtatttattaaaatttctgcttttttaaatatttgtttgtcctcttgtgtattgttggcttctttctctgaaacgtaatgtctatgaatcttctctgaaatgtaatgtctatgaatcttcgctgaaacgtaatgtctatgaatctaaggaccttggttctcttctttatagttgtatcttcagtgcctaagccttagcaattatcatgttaatcaatattgttgaatgaatgaatgagtgaacatgtgaatgagctcatgctgtggtgaccttcactgagcatcgttgagtcatctacatgtgcatacactgtggaggatacaaagatgtttaccatttggctcctcctcttgaggaccatatgcctgagctggaggtctatatgccctactatgccatgcttccaccctccaccttcctctattcattgctttgttactgtattaaataatactgttaactttaagtaactcttactaaaaaaaaaaaattaaaaaattaaggctgggtgcagtggctcacccctataattccagcacttttagaggcctgggattataggagggtagcttgaggccagtagttcgagaccagcctgggcaatatagtgagaccctttttctatgaaaataaaaataaaaataaaaagttagccagacactgtagctagttccagctactcgggaagctgaggcaagaggattgctgaagactgggagtcgaaggctgcagtgacctgtgattgcacctctgcactccagcctgggcaagagagctctgtctcaaaacaaacaaaacaaaaaaaaatcaatacacttagataaatatatacggagtgcctattatgtgcttggctttcttttaacacttcccatgcaactgaaaggaagcagtctttcataaaacttaacattacggtctgccatatctgaggactgaggctgctcccagattacccctcaacaactctttctattatactgacttatttcaatatgcatggttatcccctggaacttgataaactcagaatgtttccattgctgaaaccttgaatctcaaaatataacctcatatccctctagctctctcagtctctctcattaagttcaccaacgcattgacaccattggctattagcccactttctagttaacttacttgctccttacctgagccactataatgtatttcttcaaccatatttctaccaataccctgatcttgtgtcttgtattgggcttcacaaaccttgatccatcagtccagccacctcgcttttcagttctagtagctagattgctaaacactataggaaaactaatacgggtatgagaacttgttttgagctctccaattcttttattaaacagtatctattgtttacaggattttctaatatattttagatgtagaaagtgaaagaaaaataatcttaggatctagaaacactataacctgaatgtcttcaggtagtctcacactctcctgataaaaacaagcatgcatattcaactttcagtctctctatcaacttgaccgtatttgagccaagccagatttcactctctaccgactcaggggaacaaatgaacaattaccatgcttacaaccaaagaaaatatgtctaccgtcatcctagattctatcccttcctctgtaagaacttgttctacagtctcccctctttgtatgttcaactgttccctctcaattggctcttttccctcaatatatggaatgattgaaatttattttccttagtgttttttcttttgtctgtgaagcctcctccactgtacttttccttaccttcatggtcaagtgcattgaaagtggttacttttgttattgccactttttcatctcacttcagtccctaaaatgactgtacattaggttcctgcccctaccacacctttctacaaaatcacttttctaaagtggtcaatgacccccacatttcctagcccaatgatttttatttcttatattttttgtcctttttctgtcattctgtttttttcttattcttccctactgattttccaaaatactagtttctcctgatttcattaagttctcttagcttctttaaggagatcattgtcacttaaaagaactattttctactacaagacccttaaaacattggtcttgctgaggacactaatcttttcccttttctctcagtctttttacactcactgaataatcttatttattttgtcatgtattttctcctttttgctgggccatccccaaactgtgtatctttatgtttgacttcctcaaaaagagtttcatctggatgttttataggcatttcaaactcaatatatttaaaatgaactcacccctcctccttgtcaacaacaacagtcagcatttctttcaaatgcttttcataacgtgatgatggcagaacaccctcctagttacccaaaaaagatgagatgtgttcttaatttctttttaattcatctaactcatttaccttttttaccaggtcctaatgagttgcttttacaaatacttctaagattgagtcttctctttcatcagcatcatcattatccttattttaatgactctcaatatgttttcacaattaaatggatttcctaatgcatttcctgaattctagtcgagattttgttttcaatgtgtacttcttatgtctggtaggctaagcttttagtgcaaggtaatactgggaagaatatgagttttggtttcagacagacaccaaacattctttccataccagaccctcctatcactgaaagtcctttaaaatctggcttctacatagctggcaagacactacctcacctcccacctccatatgtaccctttgtcttagctaagttggtgcctttctctgaacctgatgtcctcatgtcatgcatattagtccccctccttgggggaccctccatgaatcttatatagtttctaaaaccttgctttaaacctttcccaatttccagggagcaaaaagccttctctgttctctgctttcactttactcctttcttgtcttgattgttgtattgctcccacatgtttgcctctgctactagacagtatgactcttaggagcagtgtttaccttagagcagcaggtatatggcacattgtaagagactcgatatttattgaataagtggttagacaaatgaaaaattgcttacctgaggtccttcctgaagatgatgcttttatggaaaaattcataatttttatctggcatgatttaatttgttttactcgacacaattgatctcaagattttaaatatcatatggttactgatatggtttctaacaaagtaaaaatatattaggtaaaataattatcatgagacattttgaaggaaaacctatgaacttattttttactatgaaaatttgggtgaaatatgttcacattagaaaatggtacagtcatctaatagaatacacatagaagcaattatgttagttaaagatttagaataaaaccgaaatattgaatcaaaatatgtcttacatatttgaaattgagttcactagccagttaaaataagcttaatcaagcttgacatttcattttcttattgtcttgccatattttcccccaaattaaattgatatatgaagtagtattttctcattttctaaaaattcaaagagtcatagttcaaagtgttctgttctcttcagtcattcagtcacttatgcaggggtttaatcttctaactatgttgcagcaaaagtaaaccttaggtctacataacatcgcatcacatcctataatcattagtaggtatgaatttgtttgcatcaatacaacattcttcatgtcaactataagctagaaaagtgtttcctatgttcctaagcagaaacttagggtagagtgacacatttctatagagtgctttcagggaactgttttgcttttcttcaagaaattgactttctgctctctcccaaactgcccttctgcagcctttttatatacctactttcttttttaatataaaatacagatggagctgaaaagtggaatattgaccttccggttaaataccagtcttgcctttacacaagtggatctattgctggggctatcctattgtaatggaaagtggaataaagtcattattaaaaaggaaggctctttcatatcagcaagtgtgaatggactgatgaagcatgcatcggagtccggagaccagccactggtggtgaattcaccagtttatgtgggaggaatcccacaggaactgctgaactcttatcaacatttgtgtttggaacaaggtaagttccatctggaggaattcacaaatccatacagccctggtgctaacagtttttggtggttctgtgtttcaagagatagcaatagactcaggctaaaagcagcacccaacagcatctctttttctggagaaatttaaaccttaaaaactaatgaaaacactttttcaaagagttttgtgtgttacccttaacaatgtgccatcatttataatcagcatatttatttcaatatgtcctcagtaaatagtaattaatatacatattattattaatgtgacatataattatatatgtggtacataattatatatataaattactatttactgaataaatatcaaaataaatatgttgattataaataaggtaactgaggtgcttcccaaagatgatatttatatggaaaaattagtaatttatatatttatttaaatatgtaatgcaattatatgtgagatacataattatataagaaatatatgtgtgtacatacataattatatatataattatatatataatgcatataaatgtatttcctcatatgttggataatgatcattatctgtatttacagatgaaaaaataaattaagttggtatgcataactagtaaaaaatatcaatgcaattcattgccttttctttctttgacataaatgctaattgtctccatagtttttcagtagagctttcatgtggaaaaaaaatgtggggtgtatgtggttgacttccaaacatacttgtgaaaatctatatattgtagattattaataactataagagaaaggaaaagtgcattatttacaatttaggtgagaagttaactcatagacgtttgaatgtaatcagagaaataattaatttgaaaaggctaacaatatctgtgtatcatttcttgtggcagtcatggttctgagagcttacatgagaataggtgagtcaattattcataacaagtgtgttaggcattattatttatatcctcattacagatgaggaaactgaagagcagagaggaaggtaactttcccaaggtcacatggctagtaagcagatagcaagacactaagtctctcaggcagcctgttataaagtcaactctcctttttacagtcaatgctctcttttatgggcattggtcaatgctcctttgtaaagtggggaaagcatagtaacttccagcataggaccaagcaccctcccacgtgtgaaaaaggtcctttacgtatttcaaaatctacataccctgaatggttaaaattttcatgaggcaatctttgcctatttggtaagtacataaagatttaaatgcctttgaatagaaaatatatggcaagctcttaggagacttttagaagggtagtagtaaggagttaatgaataactggggtgtaagacagtaatgacattttcaaggcacttaagatgtaacagcagctaaaaatattacattcatataagagcttctccaggttttcaggtttctgaggttagaaagaacttgaaaacccttcgtatgagtgagattacttaatcctgtttgcttctgggaaaaaaaaaataaaaacaagaaacaaaaaccctgcatgtacagccttgttctttgaattacccctaaacccattactattgatggtcctaaagacgtggctaaaaccaaaattgtaagataataacagaagtttaaaacatcaccatagacccaaagggaataattttacctacacactatgactaagtctgtgatactggaagatattttattagtgagtaatattaaatttttattactgtagtatcatccatatcagtggtctcaaaacactgaaaaaatattgacgtatggtagctggaacgtagaagtcaaaattagccattatttttactattcaagatacattgacatcacctggaatggttattaaaaatacagatgttagggacccctgtcccctaagattctgactcagatgccttgagagacactgatctatataaatagctgcatgttttatacggtgatcagggagactagtcacaatacagaggtgcagcatgtatgtagtcaattgcaattaaaacaaatcatgttcatttaatgtatttctttcaacccactatcaattgtcttaaaaacgtttttccttttctctgcttcttaattagcaccttttttttttcatcagaagctctattttgtggtcatattagtgctattttttttttaatctactaacgttgcaatcttcctccgaaccagatacaagactaattttctttcttgttttgaaaatgctgggcaacataatttgctgaagatgtgccagctcagatgatgagagtttatcttcttagaatgatcaatgaggataatcacttacatctaggttgggcatgactgggtctggcatgtggtctcacaggcaatgctctgcccaaacccctccatggagagggagagagtgggggctcaaatttagcaggcctgccaagccaagcactctgcagcagtactgccttccctagaggaagggctaatgtttttctgattagtcatcttagagctctgggccgccttttaggcatttagaggcccaggggtggtggtgtggatggggatttttttggattctcacaagggtagtggagtaagaaaagaaagcatttccactcctctcgcaaacatcccctttctccttttgttgtcctcgcatctcattcaaatgttttaggtctggggagcatttctggtggtacagagttgaaagcacgggacaaccttaactgaactctttggttgccactggaaggaccctgcactagagctcagcagcttcaagagctcagcagtctccaaggccagaggccagaggaccatttccttaggaggattagtgcttacaaacttcattttataactaactctctaggcctttttcttcatctccaaaatgaagaaagatgtatctccctgggctttcccaaattgaaaatttcatcttgtgaattaatttttatgatgttttttgctaaatttttaattttttaaacattatggtaaaatatatgtaacatgaaatttaccattgtaaccatttttaaatgtacagtttagtggcattaggtacattcacattgttttgcagatatcaccaccatccctctgaagaactcttttcatcctgcaaagctaaaactatgtacccctcaaaaaataatgtagcatttcttataacagcacttgtttgccaagctgccctttcactgttctgattttgttggtagggaagttagggtacagagaattttgataatacagttatgtgccatcagaaaattactactgataaatacattaaaattcttagcttctgaattttccagccaatgatttcatattgagcttcattgctttcaattcaattcacccaacttattgagtgtctactgtgtgtttaagatagactagcagtattgatcagtcaggactaaaaaaatgtggataatagtaaaagacatttaaaaggaaataggctgcaacttaatgtgttagaaggcataataagacatcatatgaatgctgaggagaacaatatggtcattgttactattaacttattttactgttatgcatttcattatattttatttccatttcctgctgctgtgctttaatcttgaaaagagctgatcatgtgtttgaggcctttcaaactttacagtgttttgttcggagagagagagagagagagagagagaacatgcacgctacagcaatctcaaactcggtcctgtttgtcccaatttcgtgcagttttctgcgcagagtactgccagacttcactgagctgatctctgttttcacaaaatagcatgtaattcaaagccactgctattccctggctaactggatgccttttttgtttgctgtctaacaaaaaagtggtgaatactctaaattcatttcatccgcattctctgttaaacttcacagaatggtactgcgcagtgggtgttctaaggtcacctgtgcagaatgcacattccatgaaatctcatggtgttgctattgccaacagtgaaggctggcccctgtcatgctaatggggatgtaaaactggtgaccattttgtatgttcaagattatggaactctgtgaaaaatgatagagcatagtgacagctcttctgtaggctgatgtaactcgggctaaattctatacctctgaagtgatcattatgccattcatggcaatatttcaggactaatatattttgaaattatgttctctctcctggtattctacataaaatgctcagagtgtatttttccccaatgagcttactgaataatcatgctaattcaaatattattttttggcacttaaaactgacttatatagtaacttaatctttcagaattaagagacatggggctatccccctaccataatatgaagttgcctaaattttattttatgggaagaagcggaatttagaaaatgtgggcctaaggaggtaaaataaatgctttttcagtaccaaaagttaaattagaattatccattaatgtgttttccaaataacagaactatatttctttgcaacaaattagcttgttaaaaagtaggaggcataaaaggttttccaaggaagactcgaaagtctagcaattgtatctaaccaccccccttcctcaaaatgtagtgctgcagaggacaaaaatgattggtaattaatgactcaagccctttatgcgatactaatcccttactatttgctaggtttcggtggttgcatgaaggatgttaaatttacacggggtgctgtcgttaacttggcatctgtgtccagcggtgctgtcagagtcaatctggatggatgcctatcaactgacagtgctgttaactgcaggggaaatgactccatcctggtttaccagggaaaagagcagagtgtttacgagggtggtctccagccttttacaggtaatgtggaggtcctctaaattaaatgttacatgtctcttattcatccccctttccctccctgccagcccctcattaatctatatgagtattattttaatcttgctgcatcttatttccatttaagaatacctgtatcgagtgatagcctcgcatgaaggaggttcagtatatagtgattggagtcgaggacgtacaacaggagcaggtaaatacttatcttcaaatgcatatgtgcacacacacacatgcatgtatttgtgcatttatataaaaggaaggactattaccctgaagcagtaatatttttgtagtcttctgacagagcatgccttggtttgaaaatacatctgtcaatggctaaaatgcttagtagatcagtgcttttcatttaccaagaattcactaaatacttgctcagacttgatcctttcctcttaggatgcagaagtaaggaaagttcaggttgtcttaaggatgtaatagtcccacctacctaacatgtctaaggataggtaacctttacagatggtgtagatagcaagaagctgaagtcagggattaggattatccttggctgggagtggcaccttcttgactttctcacagaaagcacatttgaaacctgcaactggttggaatcaggggtgtctatgacatcattgcagatgtttgccccgttgttgactattagaatcttagaatgactctcccaagagagaaattgctgattggtttaatatattttgaattggaaaagaaccaactaggagacagtatacattagacctaatctcagacaactgacttgttttgtacttctgactggccacaaaatcttttcccaaaataccaccacaggaaggcattcagcacaaagagttttgtgaatcagtgacattctactattttgggtcaaatatttgtcaggaaactgaacacatctccagatgattgccacttatgtctcagcaaggaagtttattcagcgagtatcaatttgtctaaagacgtgtttccatcaaggtattctcttatacttaatcaacagtaggttactatcccaggcatcctttgaggaatcttcttaatctaaaatataattaaatactgagatgagcaactaagaataattttcaagactctctacctacatattttccagaagaggacaacttgacacttttccaggatgatttaaattatcacctatttataggcaagacaatgagctgaacgatctcttaaaattcttttcaacttcagagctaagagaaagctccaatataaaatactcacttgttactgacatgttctctgctcctatttcacactcttctactttattaacaaatataaagcccgctttgagtataattcagcaacattaataggcgtctggaaagcacattgcttacttagcttaatagtccccattttgagtactactgagaaagtacacaaatagagctctgaatttatagcaatgatctgaccacagccctatgccataaattcatatttacaatctgaccacaacactgagcagctacatgctcccaagggttggagaataattgcactatttaattatttttgagtcagttttgctctgtcccttatgagaagaccatctgttagactgtactgtactttgccctgtaccacatttccgaactaataaaatcagcgtcactcccattgtccctttccttgcaactcgatcttgtggcctgtgtgttttctataggtgtctgtagtgttttaactgctcagagagtggttctcccctttggtgtttcctcttatcttttatgttcactttgtttcccttaaagctgtcctactttattggtctggacagtaaagtcggagaggaggagatttgatgtggaaaaaccagagtgatcctccatcgacagggctcaggagtccatgagcagctagagcaggtctctcatccatcatcctgccacggagttccttgggctctttctttgtgtccccagtgcactcagctgtgatgaagtttttactgatcagaactgtagaaatgtctaataaatagttaaaggtaatagattttttaaattagggggctcagcttgtaagtaaggttttgcagttcttttaaacttcctcattttgtgatattattttgaaatattctgcagaacaagactttgaaaatgactttgtagaatctcaaaggcaccagctcctttaccccacccccacccccaaaaactgcaactaagaatatattccatatatcatatctggtagaactttgctttttaaaaattaattagaaaaacaattgcatttggaaaatgggtctaggcattcaagtacaacacaatcacatttgtgattttttttttggctaatacatcgaagatataaaagtgtcaaactactatgtataataacagtctaattatcttgcttcaaagggggtacatcattatattgcttgaacttgttatctgcctaccatccacctccttctttatgagtgatgtttaaacatgtctgatacattaaatgtttttggaaaacctggactagacttgaaagaatgttatgtcgatggagttttgatggttttgaaatatcgcttaaactgaatggctcaagatgtgcagtcatattaaatcaatgctgaaaagttacaactctaataaattgtatttatgctaatggttgagtctgatttactgcggccattaaaagtgaagaataggagcaatagtcttctcagaactgccattttccctattttctcttttattccttcacagctccacaaagtgtgccaactccctcaagagtccgcagcttaaatggatacagcattgaggtgacctgggatgaacctgttgtcagaggtgtaattgagaagtacattctgaaagcctatagtgaggacagcacccgtccaccccgcatgccctctgccagtgctgaatttgtcaatacaagcaacctcacaggtaaatgcaatcctttaacagagtagaccctattaacttcctttttgtttgcattttaaataaaaatcttctgcaaatgttttttagaaaaatgtattaaatatacatgtattttacctgattaaaaacaacacccatctaaagtagtggaagcctgcatctacctaggataaaaaggataattctacaatgcgcatgggctctcatggataattttattctaaggtagatattctctccatcccccaaagattacatcataggtggctatagccctttaacaccttatagacatcttttggaaatcctatgtataaatacttatttcacaaagcaaaaatttactctttgggactagccccagttcataccactattatttattgtaaaattgctgattaaacctaattatctcaaggtggaggagtcttagagccccagttagttggactggcaaatcagtgaatcgatttctcacagtgtggtgtgccatgaagaatgattataatgaaatatactcatacacaccactaacacatctcacactcaaattcatgcgtgtgtattaagagcatttttcagcttcatgaaatattaaagcacatttaaagggagagtttaatttaagcctttgataaaagggaagtaaatgtgtcaaatttgacagaaaaaaaacattttcctctatcaaaaaatcctataacgtgaaccatcagaatggacgttagaaaagccttaaatattttcccaacaaacctgttggtcaattccctcaagactttacttccttctttagacactttggaatgcacagcccaaatatactaccaacttttagcaaaagaaaaacaaattcacacccttcacttctttcctattttaccctccttatcaaagcccagcctgagtaagcccacagcttgccttttcacaggttgcatatggcagctacatgggctggaaaataccaagtagtttattgctaaaaatgctcaaccccactttcagatgagcactcagtaatgacaccaaccctactgtatttccagaatagctccttcccccattctcctcattaaatattttatatttttccaaactatacacgttacctccctttctcatcccactcagctgacagcgttctattttagattatattagacaccatagaaaaaacaatttattttataggatttctattactttcttactaccaaatgtacatattaattgcatttttctgcctgatggagttgttattaggggttggatgaatgaatgcatgctaaaacacataaaaccattttgatatacaggaggtgtgtgctatgctataattttattttcattattatttttaattttcacgctttttttcctttctgttttacaaagcttctcttatcctatcaaaaatagaaatcttcacaagtcctctggaccctgactctttctgtttcttcagagatattactgatagcttatcgtcctctcacttatatttttaacgcctctgtctgctgcagtagagtatggcccaaggaccagcattactagcttcacttgggaacttattactaatgcacattctcctgccctgcccaccccacacccgccaaatcagacactctgcagtgtggctcagcagtccttgttttaacaagcccccagatacatctgatgtatgccagcatttgagaaccactgactgggtggattcttcccagggtcattcaaactcttttatctcccattgttaaaaaccaacacactaacccaaaccaatcacaaaaatcttaattctgtccaaactcccagctattgctccctctctcctcctctcggccttcgtctagcatgaagtatctaagctcattttgtcctcacttaactggcttctgctcattactttcgtgacgagcaccaaaaactgccatgtttacataggcaaaaaacacttgacactctatgtcttcaccactcttcagcattctccacagtaactctttcatcatttctagaaatatttcttcacttctgtgacttttctgcttacctcctggttctccaggggccctgttctcagtgtcctttgctcacttcttctaaagtgtgacaaaatattgaagagtctcaggatttagaactgggccgtcttctctttctctttcatttttttctggcttgctccagaagccttattgactctcataacatcaaataccagatagatgctgctattgactcctaattgtacatcccacctagacatccaaatgcctgcatccaataggcgtttggacacaatgacatttccaactggatgtctctcaccttctacccataccaaacctcaactcttgcttctcctgcattctcatagatacctccagccacccagtcaatacaatttgagagttactctggacttttcacctccttcacacctcatatccacagttgtcattctatttttcaaaatatgtgttaaggtcatccatttctcctctaatctactggccagcccaaactactaccatctttttcctggacaactgcaatacttaccttcatctttttcatagccttttttttttttttctctccctggccgtgagtgtattctacagagcatccaacatcatgtccctctcctcaaaaactttctttcttttttttttaattatactttaagttctgggatacatgtgcagaatgtgcaggcttgttacataggtatacatgtgccagggtggcttgctgcccccatcaacccggcatctacattaggtatttctcctaatgctatctctcccctacacacaccctccaccgctcgacaggccccgatatgtgatgttcccctccctatgtccatgtgttctcattgttcaattcccacttatgagtgagaactcgcagtgtttggttttctgttcctgtgttagtttgctgagaatgatggcttctagcttcatccatgttcctgcacttcctctctcacaatcacactttgtctgggtctccccctacttccagggtttccaacaattaccgttgtaattaatataatttaaagaaatttgtatgtaaatccttaggagaattcctgacaatgatgatataataaatccctagcagtggaataactgcatcgaaggcttttaagacattgtatagtcttgaactttgaagtcagacattgatataaatctctgctatataccttccctgtggataagttccacatccttctggatcctaaagtcctaacctatgaaatgggagagtgatatttacctcagaagaatattgaaaatattaagtgatatgatattctagctctaaccctttttagctgtgtagcttggacaaatcaataaacctctgtttgctttaaaatccttctaggtaaataagaatgagatacaactacatgcctcccagggcagctgtggggattaaacgaattcatatgtatgtaaagcacatagcacagtgcttgacatgtggcatgcactgtatcaaagttacctacaggatatctgtaaagtgtgtaacattatgcttaatgcttggtaatttctcaagaaatggatagcaattattattattattattactattattatttaatgaagtctcactctgtcgcccaggctgtagtgcagtggcgcaatctctgctcactgcaagctccgcctcccaggtttacgccattctcttgcctcagcctccccagtagctgggactacagacctccacgcccgggtaattttttttgtatttttagtggagacagggtttcaccatgttagccaggatggtctcgatttcctgacctcgtgattcacccaccttggcctcccaaagtgctgggattacaggcgtgagccacagtgcccggccaggatagcaatttttacactgcccaaaaagctgtacaaattatgcttccaccagcaagcagaatgcaagattgtgcatttcattttatctagccaacaccaaggtttacacttgaaaaaaattgcaaatttaaaaggcaaaatatatcagaatattgttttagtttgtatttatgtgattactagagagattagttttttaatatttattgaccatttctacttcttttatgatgtgcctaggtaggtccattgttttttattttttattttattttatttttttattttttgagacagggtctcactctgtcacccaggttggagtgcagtggtgcaatctcagctcactgcaaactctgcctcctgagttcaagagattttcctgccttggcctcccaagtagctgggatttcaggtgtgcatcaccacgccagggtaacttttgtatttttagtagagatggagtttcaccatgttggccaggctggtctcgaactcctgacctcaggtgatccaccagccttggcctcccaaagttctgggattacaggcatgagccactgcacccagctgcattgctaatttttctattgaatgattcacattttctcattaaagtttttctctgcatatgaagaataatatacatgtttatctcatctaatgcaactcccccagttttgtcattttttaaaaaattttgatttgcatttttgtgtagagatttaaaaaatattttatgtagttaatataacacccttaaaatgttcaatattctatgtgtgattttttaaaaatatatattccccatttagggttgattattgtttatgttagatataccatattgataacatataatgcatattcctcaaaatagtaattctaaggttaggataagaacaaatcagaaactggatgcagggaggcttttcaaattaaatcagcctctcccaagattctgaaggataccttcttgaaggcgagatcccacagattgtaaaccaatgtagggcagtactggatgttactcaaaaggcatgtcatacatggtagtgatgtatagggagaagaaaatcagaaaactgttgagcaattgttatttatttttatatatcaaatttgtcacaaactaagggaagagttaactatgttaactatgcatgcagttttgtcaatttctctgagatttttttgtttgaattttttgagtttttattacttttacacttattatttatgttttaaccttcaaagtctcattgctttaggtacagtcatgcattgctaaaggatggatatgttctgagaaatgtgtcattaggagatttcatcaccttgcaatgtgcttacataaacctagatgacatagcctactccacacctaggctagatggtgtagcctattgttcctgggctgcaaacctgcacagcatgttactctattgaatagtgtagggaactataactcaatggtaagtatttgtgtatctaaacagatcaaaacacagaaaaggtatagtaaaaacactgcatggtaatcttatgggaccaccatcctatatgttgtctgttgttgaccaaaacattatgtagcacatgaccacatggcagcaacttggctaacatcctttaattcaacattgttttcttataagtttgatgagaaaattaaaaaaaaaaaaacaatccctagcaagggccactctctgcatggaattttcacattttccccatgtttttgtgggttttctctgggtactccagtttcctctcacatcccaaaggttttccccttacatgaattgagttgtctacgtgaccccagagtgagtgagtgcaggtgtgtatgagtatgccctgtgatggtatggtggcctgtccagggctgattcctaccttgagccctgagctgccaggatgggctccagccacccacaaccctaaagtggaataagcagattggaaaataaatgaatgagtaaatagaaatcattataaaataaaaattcataaagtctatgataatcatacagatgcacagcaataaacaattcagtatgacagggctcagcaagctgcccagtctgtgattgctggggtttgaacttcatgctggtaggcggtgctccttacaatgttcacttggaaagcatttattccttgatttatataccacaccactgtcactcactgattcaccaaaacttgagtaaatcattatttcgttttgattaatcttttgtaaatgcatgtatagcacacattcatttcaatgtttaatattagtagtctatagaaatttggtgatgttttgtgaccagaaatatgccataggatcttaattcttttttacatcaattagcctgtgggaaaattgggtttgttgtatatcatttcacttaaaagtgatagtttacaaaaaattccaatgacattaagtgaagacttctatatatctctgcagttttagttttatctttcacttgagattctctgtatttaagtacgggagtcactcattcatacttgtttttataattgatataattggtcttctctctgccatcatgttttatgctttccagttttattatttcttgttttttagtgattttttcactacatttcttgccaatgtgtactatgaattctttgattttttttctttcaaggagtttgcttctctcaatgctaaattgagtcatcaaggacataggtagaaggtaatcttaaagactaagaagaactccagtattgccaggtggacttttcattgtgaagactcaggataatgaggagggaatgtgaattgagagtcaccaaagccagcttggataattatcaaagtcagagaatttcccagtaaacaaaaggaatactaggaagtgagatggaaggagctgataaagcagagagccagaaagctggatttggtggagacgttaggggtgcagagattgttttgaggcagctgttttgccagttggttgagaaaccaaggtaccaaaagagagaaaaatcggtgaagcctatataaacagttttgctattgagcagttttgctactgatcttgaaaataacccttatttagcatttctgaggtgacttttgttgagattttaatatttaagttaattttggttgttagagtcatatttaaataaaataattctgacactgaatgtacaaggcaatttcgctttattagttagcgtagggttctttaccaattaagtttaaaaaatgctaatcagaaaatgtgctgttttatttcattaattttttgttgtataataagctcttttattcttcagatttgggtctttcttcagcttggaaaatttgccattgtgtttatgatcattacttctggtgagaaatagcaattttcaatattgtatatttcttcctaggttgtcttcctcattttagtagttcagaacacggcttgtagagtcaaatcaatctaaggtcaaattccgcctatgccactttttagctgtgtgatctcagacaaatttaaaaacatatccttacattggagtttcctcattcataaattggggatgaaaaccttatttatattatggaactgctataaagattaaaatgagttatgtaaaatattttgctcagaaacaggcacatagtgagtgttcaatgaattcatagttacctttataatctctgaattacagtttctgatttctgggttattgtcccataattgtttttatttccattttctgatttttgcactgttgattctgctctttgaaacttctaagatgatttttaattcttctagttcagtctttgatatgatctgcctttttcctcatctagcttgctttgatttctgcctgcctcttgaaattctcaatttttgtcttcatctcttgtttactgcttaccttctgtctcttacttagtggattccaagttattttagatctaattaatggcatgcaactcgtgatttttaaattttacaagtttcttgaattaaatcctccccagaatatgacaatcttccataatttgagggctatatccttatccttctttcaagttacaatttttccatcagctaaatgtcctcccccaaactcaactccatagtttagttggctcatctctaatataaccttctgactgggtgtttgcatgggaaaattaaactgttttcaaatcatcttactgggcatccagttgctgttaataaaagcctttgctaagatgatgacagggttagtggggtaagtttgcattagccgcgcagccaccctacagtttcagcttctttcttcccagtgtttggtagagtaggagtgctgagagcttgctggcattttgcttccagtttaagtttgggtttgcctaggactttccttctaacagtccattgtctctgcctggtctcgttttaggtatttataaaactttggtcgtttcactgggattcttacaaggtggtagttcaaaactatagctgtatactgagtcaactggggagctttaaaaaatatactgatggctgtgtgccccacatgcaaaatgtctgattaaattggcctggaatgtggcctggacatttgtacttttaaattatctcaggtaattctgctgtacagccagcacagggaaactctatttaaaggaggagtttgtcaccagtgatcacatttaaattttatccagatattcttataactttcatttccccactgaaactcaaaaatgttaggaaataaaaaactaaatgtatataaaaaataataagctattaaaagtaaatagaaaatactagcaaaggaatatcataagatgacaaaaattaagtgtaatagttattgggaagtgggattttatgttcagacttacaaaaagcagaaggtaaaagcaaagaaaattattaaaaatgaatatcaactaagataactgaagaaaacagaatagtgaagcagaatatttaccattcatgaatttgtctatcagaggattaaatgagataaatcccagttgcaatggagagtccaagggttaacaggcccgctcaggagcaaatgggcccctttgggccacagggtctagattctgtgccctcccaaggccaaggttcagagcaaggagttctttaaggttcattccctcagccagagcctcagggtagaaaacccttcagttatcactcctgtgtatctttagatttgttgaaagggctccaattaactctgggtagcttttgctgatttttcctgcagccctgttaacatgcaaagctgcagcccagagagacaggactggcgtttcccctcaaactgaggactgctcagaaactgacttcataatttgatttgaaattatttcaagaatgaatggattcaagacttcgcacatatacgaattattttttccgtaaggtgtttaaacatgtaaacttaattatcagcataattactacagcacctggcatcaagtgttacagatataattggtgtatacaaaatattttctcaattttattgttgcattacattgagctaaagtctaggggttatattgcttcttcaggtaaaatgataaataatagtaatatttcttactatttgctatagtttggcaaatgaatcaataatgataagaataatcttccagatgactcacatatatctacatttatgtaaagaaaaagacattttaatttataacacaaataataatatagcttttgccactaaaattgtttcagtctttacatacaatggacttaatttttttacctgaatgaagtgggtttcatactgaaaatctgcctctaatttttgcctcttttacatggctactgtaataattagtgactctcaattctactggtcataaggtgattctcagattacttataaaatgcagatttgggggtcactcacacatgattctgtacatctgggctagtatttagcaatttgcattttacctaatgctccaattgtatttttggaaggtttatgaaccacatattgaaagacactagtgtagaggagtggtcagcttagactggaatactttcacctgctaggcttgcaactatccctgctttattcctgcttctggttctgactgtgttagctttgctgccagaaaaatgccaaggcaagtgaagaaagagaggcagtgtcagtaggacccctgaaccccagtaggactcctgaacttctgaaaattcccagaagaaagaaagtaagaattggggatcttgataacatggattctgattcactaggtctgggaatatggtgttagattctgcatttccaaccagccccctcccactctgtcatgccccatatagaaaggcaaggagctcactatttatatgggaaatggaaaacaacaacaacaacaacaaagaaaaaacagtaaaataaaacaaaacccaattctcaattacaagatgccccttaggttcatataaaagtgagagcagtataattcaatgtaggaattatcattgcaatgtcttggtagagccttgcctgcatgcatttaagttacaaacattcaactacatattttggaaatgggtaagggatggaggaaaaagtaaaaaagcaaaaattaaacaaaacaaaaacctataaaaatagtgtcataggcaaaggatgctatccagtatggaaaatgtcaacatctgttagctggaaagaatgtttgaataattttagggtttcccagtcattgacaaagaagtgatactcattgtttgggtgtctacaaaaagaatgaagacttcagagccctgaagaatcattgatttctgaagagttagaggcatacacaaaaccaaatgtactatactttatgggccatataaagagttgtcaagggaactttaaatcacgttatttttgccttatgcctgattttggaacttaaactcagctatgcagagtatcatcagtaagattaaattaaattaaaatgctactctatatatgtatgtatatgtgtatgttatgtacgttcatatattatataaatatgctctctctctatatatgtattctctctatatatatgtaaccatacttacctgagaagtctgcagagaaatgactgtaattcaacgccgtgaaatttttttttctattcaactgaaagttcttactccatagttgctaaaactgcctatggtactctctgtgcacccatgctatttcttcaatagacaataagctcctggaggacaagtttcatgtttcatatttattttaagcctcgttcactaccttgctcaaggtaagtgattaatatacttatcttaaaagaatgaatgaaggaatctttcaattagcaaatgtagctttctgctactaaccccatagttaacctaatgttaatatttttttgtgctgagttggactgagtattgaactactagtccttactaaagtctcctcagtcttttatcaacagttctttaattttatagaagaatgcacagagctatcacaacttaaatgtatatttggaacttaatacacatttcccaatagaaaaaaaatatgttggtagggtaagactaataaataactaataaagactaattccaaaacttagacctcagaatagaacccaaccactacatatttgaaatgaaaaataatggaagccaatactgctgcaatgctgataattataaagaacagaaaatattcatttatttaaaaaagtgatctaccacgttccatgctagtgctaggccctatcattgtaacatgatttttataacactaaaatatagcccaagcactctctctgaagtataagattatgtagacaatgaaagttttatagggaaaacctaacagagatgggtttatcatttttaattcattatttcacttgagatactgagaacctaaaataatagcgatgaagtttttctctcactggtaataggtgtccacagtaagtcaatgcagaggcgggatgttcataggcgagacccacacacttcatctttttgctgtgtcatccttatggacaaggcttctacctcatagttcaagatgactgcttgagctcctgccatccagtctgattttcacccaacaggaagaaataatggttaaagaatactcacattcactttaaagacatattttagaagttgttcctccacctctggttatcttgcgtggccagaacttagtcacatggctgtacctagcttcagggaatgttgaaaaatgctgtctttattccaagtagccacttgcccaggtaaaaagtgtttttattttactgaggaaaaggagtataatacataataaggagcaattagtaatctttgccacaataggaaatcgtcagaagtaaataaaaagtaattctttttgttggtgttattaaagataaaagccagtttttatagtagaccataaattaatattccaatatttgtagtttattacgaacttttttttttaatttgagatggaatcttgctctgttgccgaggctggagtgcattggcaccatctcagctcactgcaacctgcgccgcccgggttcaagcaattctcctgtctcagcttcccaagtagctgggactacaggtgcatgccaacacatctgttttttgttttttgttttttttgtttttgtttttgttgttggtatttttagtagagatgggatttcactatattggtcaggctgatctcaaactcctgacctcaggtgatccacctgcttcagcctcccaaagtgctggcattacaggctacaaaatatttctttaaatgtaaatcttgaaagaaactggtctgaaaaaattcacaggacgaaaatatggcctatgacataaatagtaaaaatagaaatgatgtaatgttcctgcttagctaatgtagaaagatttcattaggtaatgcagtgttgatgagttaatagctttgtctaactctcctgaatacataatgtgcctgaactactggtacattgtgaaatcttcagagagagttgttttttaaaaaaaaaagtttttcattttattttatgcaataagaattgacaccaaaggatttgcatttctttttggtaacatgttgagccgtagttaaaaatgatgaaaatatataacttttgttctacagtgataatcaactaggcatgtccacaatgcttataaacattcaatacaaatacttcaaggttatcaatcatagttgataaagaagaagaatgcacagccagacttttctgttttctaccttttatgatcattttatatttgtgttatatttggaacaaattaaaagggttatatgtataataaacaaaggtccaatattgaacccaatctctctctctcacacacacacacacacacacaaatgcacacatagaatttcttataaatcagtcatttttgtaaaggaatattacaggcatacaaacttgctcattttggaggacaagacttctaatttctgtttgtaagcaataggtgtcagtaataaatttgaacctcttaacacattttaaggtgcattttaaataagatattttatagtaaaaagtgtgctattattgtttttaattaccatttttcaacacttttttcttgtttgtggaactggagcttaggtcaaatgggaggagtaatgatcttggggtcagaatacaggttctaatattggctctactgctttttagctgtctggacttgagcaccatacagtacactcactccaaaagcagcctcctctgtacaatggaataacaatatcagaggcttgtagcaggggaccttggacactgatcataagggatgactttcatttctctttcttttcttttcctcttgtctccttgcctgtctctctgcttagtcaggtccagtgttttcttgaagagtttcagtaatttcagtgtgagacctttatgtaaggtaaagagttaacacaagcacgtggcttcaaacttattggcaaattagaataaaaatggcaaagactctgtagttcttaccacaaaggcattgattaaaaatttgaggttagaggtaaacctgctgagagaatcttaactggataatactttgaggtcaattaaaatcactgtttaaaccgtcctctaagactgggattagaccacatattttataaagaaataaagaataatgtttttcctgtttgtaagaatcaacatctgcatagtctttgataggtatatgatattctatgctctctaccaaaagttttaaacaaggtcaaaaaacccatttgaaggaaattaaatgtaagaaaaattagttttgaagtttccaagggattaccttaggtttgggttaagtgtatttattgttccaccttttgggtaaaatgcaaattgactttccctttgtaaatattagaagtccttatttttattgaaaatattatccaaaaacaacaataacaaatcccaccctcctgggctaagaaccagaggagaagcatcctggatatgtttccagatctctattagatagttaagttttcatccatatttaacaaatgtcattattcagtttcatgggatcactgtgtcaaaatgtctgtgttagaactttattttcagaggttcctttaagtggtcaggaagcatggcatattggattgattactctctttaatccatccactgggttggtttgggatgtatacttaaaaattagattttatcagcactgcagcgggatcctcagccagaagtctcttcttctgccctccttcccctagccagttttcttttaaaaagtgggctcttccattatgtctccaggtagcagtagcagctctgcctgtgtggcatcccttaccagatggccctcttaataaatgtcttgctcttgcccaccctcactttcttgatccaaatgtgaaatgccagcaaataaataagagcattgtactctgatgagttctcttgagatgggggaaaaccctggggagaggaagctagaaacagcttttctgtttgctgtgactgctcctaattactggccagtagtagaagatatcatttagatgcagtagaatataaagataaagaaaaaaaaatgagagataaattctccatgttatcccaaatgcctttgctaacgtggaaatactcttggattgttggagtgcatttgaaatattgtgcatgatccttacaaggggacccctgactttggactcagggtagacagttgctgcatgcagatttcaccgccagactaaaagtgcaacggaaatgagtgggtgatgagagcagagcagccagttctttaattgaattaaaagctgggtgacatcaatgcagacacctgtccaattacagacaggccaaggtgtttaccattgctgtacaagcgattcgaagatgacagaaatctttccgcccacagattaacataatgaaggagaacagattacagtggatgccggccaaacaccttggttggcagctgggggtggggtgggggagggaggaggagtctgctgaagtatgtaagtagaaacggagtccttttttcttctctgaaatatgctcggctttaaaaaggatccattttgctttgtgtcttaggctcggtttccaggcagagcatttatacttgtctgcatttagtcagaggagttaatcataaaatttcaacgtgaaagcagactcctctgttgttttgctgcttctcagcatacggtgtcccattagaggtgcaaaagcttgcagagctggtgtcagctccacaatgattttgtcttaggtcgtcaggctgcctccaattattaatatttttctttggctcctttgaaacttgaggttacagcaaaggaaagagagtgttggagataataatgtatcagtcaaaagaaacaatgtctgtcactttgcttgttccctggaaggggcgtggtgggagtcaggctctcctatagtgagagaaatagccgagtggagctaacagtctgcaaaatcttaattttcagtcacccgtcaagtgctaacttttggtaaaccatactaatagctgctgggatagaggataaggaaagcagtaaaaggctatgccctctgtgttcaaggaattcccaaatcactgtgaaggacttctaagttgcaagttctctaggccaatgctcttcccctctgttaagtggaaaccctgagtgcacagagtttggagccatatgcagtaggcctcttaacctatctacggtgatgagtttccttcccttaaatcaagtccctgccccctgatctttcagcttgggctttctgcacccactgtggcccacaggacttcaattcaaagggaatctacttacttgacttcaaactcccttggtgtggcatgtcaggatttctcaatgttaggcattaatgcaaaatgcattatcgcttagcagtgagagttatggtcctgctggtgccaatgattttaatccggatacccacgctcctgtgtttcatgggatactaacacttttaagacatcaataatgcttactttatgcttattgaatgtttcttcagcttgccctcttccattacctagagggactagcaggtttcctgacatgattgggaccattttctgatttcacagagtttgtggctgaaaggcagtttgcgaggtcatctggcctgccttgtaatagggacactctcaaaaaaaaaaaaaaaaaaaagacttctctgggatgtgtcccaaacaaagagattcacaaccaaaccaattttaaagttctccctttcaggatatacttcttcagtataaaaaccccaagtgtcacaagtatcataaaaggcaactaccgcattttctatttttgggctttctgtctaggattcctttagatatgtcaattctctatttcccagtattctttttaatataataccaaaatatatatttaaattaaatttaggcttcctattatcttgaactggtaagtctgaatcttataaatgtcattgtctacttggcccgtatgcaaacattcttctttatgtatcaatctgttactgtaagaattcttctagttccaatattttcttatgttagaaaccttgtaaaaatcagttgtattctatagcaccttttccagacgcatatagcggaaacattgataaatgctttttgatgatgatatatcttcagagtaacactgtattttccagagagtacctaatctaagtagaaccctgacacttaaagcaaagccattaggataaccactcaatgatctcaaaggatatatccacaatctacatagtcttggagagaatgtgttactctctttctttggccatggcacaacttttcaacttgaatccatcctggtgaacactacttactgagaatcaaaggagataaaccacgtgtctccaacaataaaatgaccttgtcttgattccaagtgaatgaagaccacatatttgaccagccccttgcccttgcataacccttaatttttaacctgacaggaggagaaagcacagtgaaccattatagtgttcttcttcctgaagtaggtaattctaactgcctttaaggaaaattatcagttggtttgacaaactttgtctctgacacacagcatgatgaacaagattccctactggaaatagaaaagaaatggcactccagccttagaaaatgcagcacattttttgaaagtgtgatttacaagccatctaaaaccttccatctttgatccaaagttggcaagaaccaaaacatcagctttcttctttttctttctttttttttttttttcctttgttttctatttttcagctctcatttctcagggcttattattgtttcaccgggcttgaaatgggaaatgtgagcactttgataaatggcttgaaagatgatctagtttctctccagcatctttctttaagagtctcagggtttttctatgaaatacaatacaatttggtaaagatctctaccaaatcaaagctgaagaagcaagtttgctgagatgagcagtgcttgcttttaaggtccttaaaataaggagtggctaaaattaataaaagactctcactatacacatgttatacacaacgtaactcctttagtgaagacaagaaacattaaataaaacactaaagatcacttagtgagttgtgaactcaggatctggtttgatacaatccctctgaaagtctatagaatacccttccttataacttgatgtaacaattaaaatttcaacatttcactctagttatgatttggaaagaaatgtcttagtataaggaattttataaagccaggctgtaaaattgtacaatcatagagctgcttttatatttctcaatgataatacttcctgaatgtacaacacatcttcatgctaatgattgcagataaccaacctgtatatcagcattgtttctttttgggcatggtgttcctatgcctcagctgaagcatgctcatctatgaagggtgctgcttttcacatatgccccataggttaagtgatgataaagggaaactagcctcatattccaacatgcttttccttattgacattaggattaaaagtcttattctctgggggctgattcatttcttgttagcatggcgttatactaattcagccatgcaagtcatcttatttagaatcttacggtagtttccaacttggcaataggaaagacatggcaaatgccaaagatttgctaaagatagaatggctaaaacacattttatgatgataactttagttttgagcctggaatttgggtatcgtggtggaggcattacaaaatggaaaaatgaagcttacataattatttagaatgttgattcttggttggggcacgttgagtatgaaataccagtgggacatccaggtgtggttacatggcctgcagatagaaacccagaaccagggcttgggagagatgtgaagtctgtagatacaaatgtgatcactgaaagataaggcttaataagctagcaaaggcgagtgtttagaaaaagaaagaagcttgacaacaacccaatcttgagaaacaaaagctatttaagagactgtgagaggaacatgagtcagtaaaggaaacaaaggagttctcggtagtttaggagaacaactaaaaagttcaatgtcacagaaggaagttgagggaggataaggactgaggaagggctatttgatttggtatttaagggatcactgctgatctttaaaagatacaaagcgtcggccggccgggcacagtggctcacgcctgtaatcccagcactttgggaggccgaggcgggtggatcacgaggtcaggagatcgagaccatcctggctaacacggtgaaaccccatctctactaaaaatacaaaaaaattagccgggcgtggtggcgggcgcctgtagtcccagctactgtggaggctgaggcaggagaatggctccaacccgggaggcagagcttgcagtgagccgagatcgcaccacagcactccagcctgggcaactgagcgagactctgtctcaaaaaaaaaaaaaaaaaagaaagaaagaaagaaagaaagaaagaaagaaagaaagaaagaaaaagatacaaattgtctagtagcatgtagaggcagaaactgagttgcaatggtagcctaaattggaatggcatagctctgcactagagctcttgactggcaatactccatgtaagtattctaaagtcctgaacttgttcagtcttaatactaaccctttgaggtaagtactatattatccccatctcacatgtgaggcctgcaaggcctttccttcaagaccgagattattattatctgtttacagactaggaaactaaggcacagaagtctgaacaacttgcccatgtacatatggccaatcggcagcagatttggcatttggagccagcaatctggcttgagcatgggtgcccatttccccactactccattatgaagatgtgcatgtgataatgttagcttgcttttaagccatttggtggaaggagaaataacttcttaaaagaaagtaaactcagaacgtaggtcatgatctgggagatttaacaggaaatgacaatcgcaggggcaggaatgagagaaagcaggaggttctgacacgagagggttttgaaattagagagagctgaatttggcatgagatggtcacacatgtgtgtatattagttcgttggcttgctgtcttctttggccatgagctaagatgacggtgccaagtggatgaatattttcatgtagaagcatggcagacaggattcagtagcccacggagatgcctgggtcgttgctggaatgaagacttagagacagccctaggaactaagggcaagtgggaggtgtcaaagcaaagaactggtctttgctccatcctggcttgttgatcttttaattctttaaattttctactggggagggaaattatggaaacatgtatattaaaatttgtgtttgaatgatgaaagctgtcatcaaaattggcaccttaaagcaataatgtattctctgagcgattgaaggtttcatcaataaagagacaccacgagtggggccatctttttataaaaatagtcataatctatgtggttaggattaaagattgctctgaaaaacgtctttgcggaaaaacagtggtgagcaaaagcacaagttatattttggattttttttaattcacaggattaactaaataaggagtctctgccttgcttatgaacactagtaaacaaaatgtgttttcatttctacacatacttttaattgctgaacaaatctcatatatctaccagcaagccatgttaattcaatacttccacgtgtaacacttccgtttaagacaggtgtcttaattaaataaactaataattttgcaagtagaagtacaaaagcataattatctaatttgctaattgttcaactatgttaatttgcatacttgttagctacaacataaacaaatggtttgtatatgtatcgcctactgttaaaataatgaagccactcttgggagtagcatttttaaagtgtgttaataggtgccctataaaaaggactccttagttaaatacggttgaaaaatgctaggttaaagaaaattaaatagttttgtttctgcaggaggtctaggatcctggaatgagataatatatatcttagctattggaaacattgtgctctgcctcacgaactatatgtggaaccccctccccattttaatgggagaaacatcagatgctgtttgagagctgttttaacaataagttggtctcacaattttttctcatgagtccttccattcaacaatcagcagaaagggaggaaaatgactgaaagaggaatatgtttttgatttctgtctctggtctctttgtttttgtctctctctcttatagacacacacacagatatacacacaatgctctttattgatgcttatggtaaacacgcaaccctcttttgtccctttttattataggcatattgacaggcttgctacccttcaaaaactatgcagtaaccctaactgcttgcactttggctggctgtactgagagctcacatgcattgaacatctctactccacaagaaggtaaagtaatttcaaaggtcttgacttccacatttcagtcatgaataataaaataggagaagagctaaatgctacaaggccatttgctggcaaaccccaacctaatttgatgacaaagtgcattgccaggccataattgctccattttttgggggggtgcgaaaatgaatcaaactccataccctttaatgacatgcatctttaatagctgtaatgcagattaatgggctttttaattgctgttacattgttcatgcaagagccttgtcattaatatgaagcatctgaaagattaatgaaagcttcctcattttactatggctcagaagtaaatctagagacagtctgactaaaaagaattgattgtatggcacagtatgaaattgagaatcaaacggttgatttccatggtcttttttaactgctaaacagcagcacaggcaacaattatttcagtatgatgaaacctccaaatgccaattgaggcattattaatcactgcttagttccttccaacttaagtctcacttctgttgtacttggaacttacaaactgttggcataaattaaggtttcagaaagcatatgttaagaaggcagtgagaaagagaaaatattttagcacgccaaagtgaaagctttgctcaagcatcagaatgcatcacttcaagaaataacagctctcaaaacatttgaagcattgttacttcatatttctctattctggataagaggaattgtacatatcttatactgtctagttgaaaagttctttaggagatttaaacgcttgatctttagggaaaaagagtcagccagtctttctctctctctctttcccagtatctatatattccccccttcctcttttaaaccctttaccaagcaccacttgcactgaagatatgtaacagaaaggaagacatggacccataggatgaaaccaggacaggataaatgactttgtaaaatccttcttgtgacccttaatatgctgtattttttacctaaaccaatcagactcccctcacctgaactatgctgtcagtgacccagcctcagcattttctccatctggtctactggtaatagcactgtttttgttgtatcattgcatctgctgaggacatgattatcatcccctcttacaaggactttgaccagcctcaatatgggacaaatggccctatgttgcattattttctccgtatccactaaatcctttgtccagggtttacctggtacccttcataccaatttcaagctaagccccagagagatccctgctcttgtttatatttccttttttatttttaaagacattcccaaacttctaaatatccacgaagtaattctgaatttactaaatgatagaggagtttaggaaaatttaaaaaaaatgtttagttcttaggaccccccaattcattgacaactatataaaatacacagctctttttaaaaaaatatgcactaaagttttcatatgtaattgactaatttggttatgcgagctctggcaattcttatcattacatataggtttttaaaaatttatattatgaaccacattcaccagcattactcatctcagatcacaagctccttgaggctaggggactctatctgcttaatttgctttaataggtacagtcccacatagagattatgggttaatagtacttttggtggagtaacacaagcatcagtcaagtgaactagtgtaagtactcctcatccatcattgacacaaattctcataaatgtgggacagttatttaacactgttcctaaagcaattactgacaagctgcccacgaatcgggaatatttccatgcatgggatttcaggtttattccatgatttattggtttgggtctgaaaagtttgaattagaaaagtaaactaaaattagactctataaatcttttcttccacagccccacaagaggttcagccaccagtagccaaatcccttcccagttctttgctgctctcctggaacccacccaaaaaggcaaatggtattataactcagtactgtttatacatggatgggaggctgatctattcaggcagtgaggagaactacatagtcacaggtaagacctctagagttatcagcgaattgttatagtctatattcaaatataaacatacatatagttggctctcgatatccaggggttccatatctgcaaatttaatcaagaatgcttaggaaatatgtgaaaaaaataacaacagaacaattaaaaataatataaattctaaaaacatagtataacaactatttacatagcatttacattgtattaggtattctaaggaatctagagatgatttaaagcatacaggaggatgtggatagcctatatgcaaataatacaccacattgtaacagggacttgagcatccatgaattttggtatcagtagagggtcctggaaccaatctctcactgatattgaggagtgactgcacacacacacacacacacacacacacacacacacacacacacaccagataaatagagtctatagttatctgaaaatgtgtttttgaaattgggttgcttatttttatctcctgttaatcactccaattgtatgatcttgaaggtcatattagattcatggtgaaactgaagctaaaaaaatatggaaaagtgctcatgttacctccctccacccagggctgtcctactgtgtgttctcttctatagagcccaccaccccttacctaaatccttctagcaattacctttgctcagatgcagaggaggcctggaaatgcacaaatgtgctaagcacaaagagctcagcacatgacttctctgacttcagcagaccacaaggattgaaattgggagccagtgttttcccagtcaggctcacagtgtccagttggatcaatgacatcatcaaataaatgcctctctcacatgagctattagagtggtgcaaaagtagttgtggtttttgccattgacagtaattacttctgtaccacacgaatactttaaaatcctcactaatgtgtaatagtcttaagactcagaagtgtgactcagtgtggtttgaattttagatcttagaggaaacatagtatatctgcccatatcatattataaagtgtgatgatactgaaattaaatgaagtaaattcttgaaaaactttctaaatacagaagacttgcattatgtatgctgcctgtactgtgtttatatttgtattatacttatagtggttttgtatttcatattattttatatactgtatgtgactctcatgtgagacattattaatcaaatgttgactgatgaaaaaaccaaggcctagagatattaacttcttcataaaggtcataacaagttagagtcagaggtaggatgaattatttatgtattcactcactcacattaatgccaggtactaaggttgtaatagggaactggccagatactgtccctcttctcttggtgctcacagcttcatgggggcacatgtagatgctggagcaagtcgtgtggacagggctgtgtattcatccagttgcattctcaggtttacatttttttggcccccctctagtctgagaaccttaaaaggacaagaacaattacttttatattttattattcataattggatagaattccataatatttattctacaacataggtattattttacaccccaattttacaagtgaagaaactgagggaaagaaggattaagtaacccaaggtcacacagcttgagtcggaggctttggtactaacccaagcattccggctgtgttgaagaatgtggtcttaaaaacaagtgttttaacttgtcttagtttctgaatttgtaaaatggtgttaattacattttccagtattttaaagagaattagaactatatataaaatataacatgtcattagcaattggtaaagagaagttataattgttatctcctgtacaacacagagttcattgtaaaaactgaataggttaatcttactccaacagtatcttatggcatgattttaactaaaaattataaaccacagaagttatttcagaaaaaattaaatcacaccatggaaggaactttacatatattacatctttgaacctttacatatattacatttttacatatattacatctttgatgtaacatattaataattaacatacaaagcacttctgtgaccaagaggtaacattgcatgtaatgggatatcataacttttagaaccagaatagacatgtcctctgagaatccttttgctccccacgtgtgacacaggtatgccccgtatgcttactgattacctttatattacatcgctgctttttgtttgtgtcatcttgaataggactgtttgtttgttcatcggtttgccctgctgaaccataatgatcattaaggacacaactatatttgtttttttcattactgcatctcttggacctatcacagagtgggaatggaataaaaagtgttagagtgaaagaatgaagtcagatgattcctgggaataaaaacaagaagatagcaaaggggaactgatggaggataggattagggtaggaataaggcaatagagaagagagaaaaatggaaaagatacagccaggggaagagaaactaagaccccttccatgcgcctaaacgaaagctgcatcagtccacagggaagtggtgcagctaatggcaggtctcaaactgtgggccttgactctttccaaaatgtacagaactccatatgaggttacactggacaaaaccggaaaaagggcagtgtagggagaggaggaagaattcacatcaatttctaataccacctgcaaaatgacactgaattctgtattttgtttgtttgaattatcaagaacgccatgtgactataggccctgaagaaagattgtggtaaatggcaccatagtgtattattacaatagaagccccaaatataaagaaagtgaaatatttttaaagtgcctacatccatggtaatagattgattcttcaatggttttctatctttatgtaatattttaaagaatatatctccaatactacccatagcatttttttttctgctgtagctttcttggcatttcataagcaactatgttccttgttgctttcatctccaaatagtttaagatatgaagcatattgggactgcaatgctggtcaaggaggggaaataaactgagaaagttaatatggggttcaaagatgcacatgattattctaactttatagctagaaaaactgagacctagatgggttaagaaactctagtcagtaatcagaggaactaattcaaatgtagatctgtctggccccaaatcctctgcttttaatttctatacattctgcttgttgctcatattttattttcccttgccagaactctaaaagaaagaccccagaacacctgtattagtctgctagggctgccatgtcaaaataacaaaactgggtgactttaatagaaaagtatttctcacagtctggaggctgaaagtccgagaccaagatgttggcaagcttgatttgtcctgagtctctttccgtggcttgcagatagtggcctcctcactgtaggtgcacatggactttctttcaggtgacttcatccttggtattttttcctcttcctctgaggatgccagtcctattggatgaggttcccactcttacgaccacagattttatatcagtgatatggactaagttcaggtcatttatatttttaaagtttagctatctacagagactctcagagaagactaaataggaaagggactctgtctgtctgaagtcagcaagggagaaggctgtggagaaactgatctagccattgggatgggctttagcttctatgggcagtttaagtctacaccataacatgtatctatctacaatgctattggtacttactgcttgtctttgtgtcagggtatttgtgacatagtatcttttccacactgagtggcttgtgggtagaacttctattcatgatgtctggtgatttcaataatagtgtcagtttaggtctactaaagtggatctgtatagagctgaaatatctcttcatagagaaaccgagaagtggaatacagagtttactagatagggaaaataattgataatatctttaattataaaagtgataaattcttacagaagataatttaaaacatgcagacaagtaatacctgagaatcctgtcatattgaaactcataatatttgatggaattccttctactactttattcatgttaacaaaattgagctataacctatgtatgatattgaatacatattcccttattatattatgactatatcctatcattaaacatttttgtaaaaatattttgaaatgttttgaataacattatattccatctcatatagcatataatggatatttattaatgcatttaaccatttgagcaatagtatctaatctatctctattttaaatatcttgacatagatattcttatacataaatctttatttgctaggttcctagaagaatagctaaatcaaaggtaatgaacatttgcagaatgtttggtatagtttgtcacattattccaggaaagttgtcagcagtgaattttatattcttaaatatttgattattttacaaaaaaaaaagttattttattttaatttgcattttaaagtactagttatagtgaatacttttctgaataattattaaccttttatattttcctttcattcatctaatcacattcttgatgagcaaaaatttaattggggtaaggaataattttgagacttctccacgagctatcctgttttttctggttacaatcacccacactgtttaaaatgttttaccctctacaatatcagaaacttccctactaacttggtttaatgtcccctcctaaatattcaaagtgtcaacaatttttttctcactcctacttcatttacttgtagtttccctttaggtttccatatagaatcgacattcttcccgtagggtttgccagtggatcttgctgccatggggggcacaagcaaagtaaatgcatttcaattcagaagccacttagcatccaggtggcttggatttttttttcttctttttcttaaatatgaagcattaaaagtcaaaggcattgctgcaccttgagttagtacaaaatttattttaaaatgcatacagttcaaattttttaccttgcataggccataagctagtagtatggtgggtcagttctgacactgaaaaatgaatccagttagagaacctcccgaaggctgttgatgtttgctataataaatagcacacactttaagtcaaactttttcattctgtattcaaaggtaatggatttttcgtaaccatagtaaccttggtgtattctggataaatacgtgaggtatatacattctagttttatttttgaatataaactaccacattatgtattactaataatatgaaaaataggatgtaggttagtataatgacagcttaaactagtatgcattttccttctgcaaaaaataaatatttatcaaaagtataggttcaattaatttttctcccagttttgtggtattctggtggtgccatttatctttttttccaagatctccattaatctcttatttctgtcccataacagatttttaagaattttgaggtaaaaacaattgtactttaaagcttatgattaaaaacataatcgaaagattgaaggacctatattgatatcactagcagagctattgtgggccacttaagatgtgtgtatacagtacattcccaaacaagtagacaaaagaaatccttcatgagactgttcaacataccaggattgtttcaaagttcaggctggacagcacctgatcgatgatgactatccagactgtagccacagattattcttattttaaacgagcaccctaccagaaactggccgtttttaagaagtttataagatgtttccaaaaagcctacaaactttttagaaacaaaaatagcaagatggtgctaatcaggacaagtctccaccaaacccggcaaggaggtttatgcgagttgtgcttcctagttagaaaatactacctgaattgcttttggttaagccaacctaagccattgctgtggataatgactagaactccaaaagaggaaaggttaatagggacattatagaaaaataacaactatctcacaccaagccataacacgtgtgttttcaaatgtatcatctgataaatctacatagtcatcttatagttaaataagagtgactgatatctagaaccatagatagtgtcttcccactgctgttccatcaggacctggatttctatcactaagactgaggcagtaagatatagataatagcaatgtaatgagtgtgtgcatgcgtgtgtgtgtgtgtgtgtgtgtgtgtgtgtgtgtgtaattgagagacagaaaaataaagagagggtagaaaggcagatgtgggcagggggaaagagggaggaaaagtggatgaattctggtaaaatcatataggcaataattatttatgtctaaccaactaaaagtgctaaaactttttttttggtcttatttgccaaggtcaaagagaactatgtgtaaatagcaaaatagaaatgctcatcttaaactttccaaacacttaagtcttacgatgggaaatttattgacgaagaagctgtattgcttatggcacaataaaaacacatttaaaggttaggcacttctatccgagcgttataaggaaccttatcagcactctacaaatttgagctaaattatactcattcacaccaatggcttacagaagctcttttcttagcaaaatagaattttactttaacctagatattttctttattttgcatatttaaatatcacattgcagtacattgaaataactcctcttacataaaaatactattacctaaaggaatgctgttaacacgcctgtgttctgttacaagctctaatattaataaagcagagcatgtgaggatttccaggtaagatgacggtctcatccatgagtcaccatgccactctattacaaacgaggtcataccatgtttccctttgatgtctcagtcatatagtattaaattgtacaaagtctgagaaactttaaggacacgaaggaacaaaagtcaagctatgcaataagtagagccttcaaagccaaattactaagctactaactctgtgaccagagactccagaatagttgttcaaggttgttctatataccagatctttgggttaatgaacagtggatgctatactctcaagagtcttattcatcgagcaacaaagggtcaaatgaaatgaaataacttgtacagaatgtttgaatatcagttgtggttagctgtaaacaatacaacctaagtgtcgttcttccattaaggtgcttctataatgcacccgtatgtgaagaaataaaatatgtttaaatttacattttaagacccgtacccaaatattatatgatctgttaacctaattaaggaatattatgttcgtaaatgatagggaaagattctatgcttaaagggattttagaagaatcatgggaataatattcagttagaaaagcaatggagttaaatgctggaaagataacggaatatgtccttcagttgaaagtgttacaaatagaggtgtcctgttattttcagcattttgagagttgctatgattttttatgtacgttttaaagtgcttaaattgagttataaattaatacagaaaagtggacacatcttaagggtacagcttgatggatatttacaaaggaaacacatctatggaatctgtacccaaaacaagaaacagaacattgtcagcaccctgtaaagctcctcattttgtggcctcaaatcttgactcaggtgattgctttcctgagtgttgacaccataaactgattttgctaattttgtactcaatataaatagaataagaaagtggagggggggtcttcaaaaagcttatggaaaatgcatattatgaaaaatgtgaggatttcaattttttccaccaaaataaactcatactaacttgttataacattcctgaaccagatctagtttgaggtggtaagaaagttaagacatcagtctgaaacaagcccctaccagggcaacatgaattcagtaaaattgaagcaaggacaaatatcaaatttctggtgaagcttgcatagaagaatagtgaaatcattgatgttttacaaaaagtttttgaggacaatgccccaaagagatcggcagtttacaagtggataactcattttccttaaaggacaaggaacaagacagtattaaagatgaagcctgcagtggcagaccatccacatcaatttagaagggaaaatattcattttgtctgtttcctaattgaggaagacaaacaattaacaaccaacatcatacacatctcaattggttcactttgtacaattctgactgaaaaattaaagttgaggacattaaacttagcaagctaacataggaacggaaaaccaaataccacatgttctcacttataagtgagagctaaatgatgagactcatggacacatagaggggaactacacatactggggcttttcagaggtggagggtagcaggagggagaggattaggaaaaaaaaaaaactaatgggtactagacttaatacctgggtgatgaaataatctgtacaccaaacccccatgacacaaggttacctatgtaacaagcctgcccttgtacccctaaacttaaaataaaagttaaaaaaaagttgagtgaactttctacttagtgggtgccaaaactgttgcacccagatcagctacagacaagagcagagctttcaatggaaattttaaacaggtggaatcaatatcctgaaacattttatcaaataattgtaataggagttgaaatatggctttaccagtacaatcctgaaaacaaagaacaatcaaagcaatggctactaagaggtggaagtggttcactcaaagcaaaagtggaccagtcaagagcaaaggtcatggcaaaagttttttggggatgcttgaggcattttgcttgttggttttctggaggaccaaaaaacaataacatctgctaatgatgacagtgttttgagaatgttagccaaagctttagcattaaaatgcccaggacagcttcactagagtccttcttcaccatgatgatgcccctgctcattcctctcattgaacatgagaaattgtatgacagttttcacggaaaatcattaggatcttacagttctgatttggttccttctgacttcttttcgtttcctaatcttaaaaaaatctttaaggagcacccatttttcttcagttaataatgtaaaaaagactgcattgacatggttaaattcccagaacagtcagttattcagagatggactaagtggctggtatcatcacttacaaaaatgtcttgaccttgattgagcttatgttgagaaacaaaggttatatttttattttttaattccattttccatgaaatttttgtagttcccttatatgttctcttttgtcactgtctttttcttagagatataggagggagagtaaatcagtacaacaattttttgtgttcctgtacctacattcagaaccctctgatctacaggcaattgctaagatgttgttagttgttaaattcctgtcttccagaaagccattggaaaatttgcaaactgaaacatctacctctttctccaagttcagatctagaaaataattatagaaatgcttcatctgtgcaattagaatttagcacatgaagtcactgacccgtgtacactagcaacaaacaaaccatataaaccattctgagtttccaacaatgtaatgttgtgtgaccataaagtttatgatgctgtagaaaaatatttaatttggaaagataataacaacaaatattttacacatatttgagtctaattcgttaaaatatatgtgtatatacatagatacatatacatggatgtgtacatatacatatataggtatgtccccatatggacatataccaaaatactaatagtgattatctcttaataatgggagtctggtattgcttttttttcttttccttgagagtcgttcaatcttttaaattctctacagtttggatattagaagtcagattctttttgtaatgttattcccaattttaatatatgtgataaaattgatagaaaggaaagaaatttcgggaacctgactacacttaaccattaatacttatctctagttttccctagtcttcaccttatatttaatcaggttgatcgtcttactaatttccttctagccaataccatagatgacctctagcactatctaccaccatcaaaacgttatgtatatttgatgatctacctcaattcccacatcttcatttgactcatagactcttccatatcaaattcctacacatttgtcatttggacacattctatcttgcaatattgacttattttcaaaggagtaaatcttgattaaaaataagaatgtaagtgcattggttacagttattatgccattatttattttcaaaatttctgtaatatctcacataggaataaggacccaactggcatccaacaaactcactgaattgagtttaaatgaattaagttgaaaaaacactgagactcagtaaattaatattttagagaaaataacaataaataccaatgcataatttggatataattaacatgctaaacttggtaaacaattttattgaggtaggctttcctgtagcttaggatttttcatttaatcatccaatatatagcaaatatatacaaatatttgttgctcaattatgtgttttagcttgctaagactattgtaacaaagtaacacaaactagatggcttaaacaacagaaattgactgtctcacacttctagagacagggagtcccagatcaagatattggcaagactggtttcttctgaaggctatgaggaggaatctgtttcatccctctctccttgttttggttgtttgctggcgatatttggcatttcttgattgtatatgaatcatcccaatctctgccatcatcttcacataatgttttccctgtgtgcttatctgtgtacaaatttctcctttttataaggacactagtcatattggatttgggcccaccttgttgagctcatctgagctaattacaactgcagttctagaggctaggacttcaacatatgaattttggggagaacacaattcaacgtgtaactctagtgctgtgcatttgatgctgtgattaataacattctaaaactttcctgaaatacctaaaacatattagagaatttaaggtgtgtgttcacaatcagttttaagatggatatggcccatgacagtaatgaaaatatttagaaaaggtgataatcaattccatctggaatgctcccagccttactttttgcatcttcacaatcacatctcttacttccctggcttgctttctttgattctttataggagtgattagtttcctagtgctgcttaatacaatacccaaaatgggatgccttaacacaatagaaatgtattctcttgaagtttgagaggctagaagtttgaaatgaaggtatcagtaggcccattgtctctctgaaaactgtaggggagaatccttccttgcctatcccgccctccagtggtttctggcagtcagtggtattctgacagtcagtggtttctggcaggtgtctgtcagtcagtggtatcctggcagtcagtggcttgcagttgcgtcaccccaatctctgcttgtatcattacatagtgttttcccttcttctaaagttctctcctcctctaaggataacagtcatattcaatttagggctccccgtctttcagtatgacctcaacttaacttcatgacatctgcaaataccttattttcaaatgaggtgacattcacatgtacagggagttaaaacatggagataccttttgggaggacaaaattcaatccactacacctccattgactccacaactactttgccactcagttgaaactgttctcacctagattgtcaatgttctggtagtctccaattcagggacagagtggaggttgtataattcatgatgttttattgatgattcctccatctcagaacattcttctcttggtgtctgtgatacctcaccttctcaattttccctattactgttcaagctctggtgtgatctcttcctcattttcttccacgcacaaatgttggtttcccccaggattcctcttgaaacattccacacaatctccctttgaaaactcagtagtccttgtcttcagatatttttcctaagccatgaacatttttctcactgcatattgggcactcctgctacaagtgtttttactccaactccttaaaactgaatttattttatctgccacatcctaccaatgtgctcttttttctgagttttttatctttgggaaaagtaacactattcattctttttcccaaacaaaaacccagcattaatctttgattactcctccttcatccttcacatccaaacttttttgctgttcttgttttaagacagggtcttcctgtgtcacccaggctggatggagtgcagtggcgcattcacagctcactgcagcctcgacctcttgggctcaaatgatcctcttgcctcccgagtagctggggccacaggtgcatgccactacacctggctaatttttgtagagatgaggtttcaccatgttgcccaggctggtcttgaactcctgagctcaagagatctgcacatccagtcttaaaatccaaactgctgttgccctattacacttatcacctggctcctatctactttcttagccttatatcattcttttattctcatttatttctacaacactacattggttttctatttctgttggtttgttttgtgaaataccacatgccttttcctacatgcagacttttgaactttctgttcactctgactggaatttactttccccagttctttacatggctgaatcattgtcttccttgagttctcagatcttataaaaccttctctatatttgttagaataacctagatgttataagcatacacacatatacatacagagagatgatagtttttaatagtgaaaacacaataaaagtttatttcttgttcacttagcattgagtgcatacaaagtttggtccacagagtttcctttttctgcacagtcattcaggaatgcaggcagatgcagattcagattctgtcttatttaacacatgacttccaagggagctctggagttatttccattgctacagcagatgaggaagaagattgagagatcatcatggcagattgttatgggccaggcctgggagtgaaggtattaaagcaataccttgtactaactcaaagttctgtaaatcagaaatttgggtggatttaattgggttcgtaattagggctttacaaggccaaaatcaagagttggggcagtttgggctctcatctgaaggctctgggaaataattcacttctagactcattcaggttgctggctgaattcagtttcttgcagtggtaaggccaaggtccctgtttccatgttgcctgtcagtcatgagctgctatcagcttctaggggccacctcaggtcctttcacatggctccctccatctcaatgatggaggatatccagtccccctcatgcttcaaatctctctgacttttgcctccagctggagaaaacactctgctttaaattgctcgtagttagtttgcacccaccaggattcatttccttttctccatataaggtaagataatcataagtgtgatatctcatgaaattcacagattccacccacactcaaagggggaaaattgtatataggtgtgtgtcactgggagtcattcttagaattcttcctaccacaggttcagaagcagaatcactcaagcatggttcttaccctgtgaccttactaagccttggtttcctggtagaatggtaacaacagtacctactttagggatttagtataaaaattaaatgtgatagtgcatataaaaagattagcataggtcccataactcttctaaaaatggtaaataatcaacaacccatgctattagtcgcagaaataaggaaattattgttatatcatcataaatattcttaatgcaaaacatcctctgcatgcaaaaaaaaagcatgtctctaaacttcatgttcaatttaactcagaaaatatttgttgagcaggtactatgtacctcagaggttagaagttatttataaaactaagatactgtcattcttcctcaaatcattcccagttcaattgcttagacagaaatacataaaactaaatagaatgctgtccaacctgtggtaaattctgtaacatgtgtgacaacaaaagagaagggttcaacccagtgtggaagataaagtgtcacagaagaatgttcacaggctttagagtcgagtttaagaactgaggaacaggcaaacataaggaccatggttgcgtagtcactagacacagaactattaatgcgcatttcacaaaaattaaagagggaagagtttaatatgagtgtgcaccctgggtaagtaatcaatagtgagaagcaaggtgggattgagattatcaaaggtgctaagttatgttgagatatttgaactttgttctgaagcaagagagaaccattgaaggattttcagaaataccacaagacaatcagtgctttagaaaacacatagttggaacatatcattgcttcaacatagcgaagactgagtctgtgtagctgttttctccatttagcaggcataaggacaagtgggttagaacactaaatgcaagaagctaattggacttaacaatacagatggcaaaaggatgaggagaggagagaaacgcattatgtttatttgttaacagctctattgtattgtatttatatgcattagtcagtgtaaaataaaatctgcttattttaaatccttttaaatagtgtttaaatatttcctgatgacacaatctgctaaagtatttacccttggtgcagatttccattaaccttgctgtagatactaagcctacaaccatatatttatagggggctcaattatggggtaaagcctagtgacatcattataaaagcacatctggataagctttagggtctttgtctttctatctgatttaggaaatttagtaaactgtaggagaataccattattaacagcccctgaattctcagattatgaggatgtcctttctctcaaaataaaggaagagagggattaaaatctctaaagctgtaaatgatatagagaaatgcccagtacacagatatcagggatattaggggaatccagttgtgttggatatacaagaagaaaaaaaaggcagaaattaaattcaaagtattctttcctcatgtcttttgtcagtttttttttattgttttttagagagtctatataaatcctttggttccctaaaggacaaaattcctttgataattttacaaattcttttctaaatagtatctctgtattgtagattaaaaaaattaatacctaggaaaggtcaggtcacttctttcagtcaaggaatgactcattcatgaaactggaaagaaaacttctttttcactcaccccaatacttgatagctatcttaaattgaatatgtctttaacagtatatttgatattatcagtgtattttgatttatatatatatatcgtatatattatatatctgtgatatatatctatatatcatttatatatctgtgatatatatctatatatcatttatatatctgtgatatatatctatatatcatttatatatctgtgatatatatctatatatcatttatatatctgtgatatatatctatatatcatatatattatatgtctgtgatatatatctatatatcatatatattatatgtctgtgatatatatctatatatcatatatatatctgtgatgtatatctatatatcatatatattatatatctgtgatgtatatctatatatcatatatattatatatctgtgatatatatctatatatcttatatattatatatctgtgatacatatctatatatcatatatattatatatctgtgatgtatatctatatatcatatataatatatgtgtgatgtagatctatatatcatatatattatatatctgttatgtatatctatatatcatatatattatatatctgttatgtatatcatatataccatatattatatatctgtgatgtatatcatatatatcatatattatatatctgtgatatatcatatataccatatattatatatctgtgatatatatcatatatatcatatattatatatctatgatatatctatatctctctctatctatctatcacattttctttaaccattctatcagtgatgggcatttaggttgattccatgtctttgctatcatgaatagtgctgtgatgaacatttcttttgatttttattgtctgtgttaggacatcataacagggccctcctaataccattaacaacgcatcatgaccctggtaatggttttgtagctgaagtctagatagtttaagtgccctatcttattcatttgtacatattcaatatatataataactactattttctggacgttaagagaattgctgaaaatacagtggtaaactgcaatgaccctatatatcctggtttgtacactgttttatcttctgtttcagttaccttgcttaaatcttgtggctatatgacactaataaaagttaccaaatttgtaataaatagcatcacaaatatttcattgtgcttgagattgtttcaaaggttttgatttttctggctatacacacacatatgtaacataacataattaaaaatgtaatgaacatcactagactactagttaaacaagttatggctaataactaatatgtacacaaaatatgtggacacaatagaacaagcaaatctttatcaataggagaatatcttcaaagtgtatattgtaaagcacttgtgcagaaaagtatattctatattctgctaatgtttatttgtttggttatatgtatgtagactacatctggaggcatacatataaattcaataattgctaaattcctaggagaaaactgggtaatagtgacacaaaggtggagagagtcttaatttttatgtaaggtcttctgtacattttggctatcgtaccatgaatatatattaatgcattattcattcaaaattaagtacaatttaaaaataaaattactacaaaatggtaaattttaaatgttaaagaaaacttggaaaaatataaagaaaaattcaaattgtccacaattttatctaccagacacaatcactaattatattttggcttatgcatttaaagtctgtttttttattattaaagcacagatacaaacatataattgggaccagactgttttacaactttttaccactttataatatactaagcttattaccaaattgcttgctcagcattcttttatgtaacattttgtgtatgtgcattttaagttttttaaaattaataccacaaatgtgtttatgcattatttaaaatgatatattcttcttcctattttgtaaatgttttaatatatatgaaggatgctaaccatttgcatgcactctatatgacagttatttttttccgctttgtcttttgtatttttttactttgtttatggtggtttttaaattaagacatttttaaaacttgtagtcaattcaaatttagatatattttccagcatagtgtcttccttaaatagaaacacttagattttcttcacttcaagaatagataaatatttcctgagattttctttgataatttatactttcaaaaatattttcacatattccagcttctgtgaatatttttatttatttatttatttatttattcatttatttattgagacagggtctcactctgtcgcccaggctggtgtgtagtagaatgattttggctcactgcaaccccgcctcctgggttcaagccattctcctgccttagtctcctgagtagctgcgattacaggcatgcaccaccacacccagctaatttttgtacttttagtagagacagggtttcaccgtgttagcccggctggtctcgaactcctgacctcaagtattccgcccaccttggcttcccaaagtgctgagattacaggcatgagccactgcacccggccacttctgtgaatctttaaattacccaatgatgtgtataagggttcaaattttattcccattttctcagtgaagaaatagagattctgaaaactgatttgatatgcctgaaatcataaagttagttaatgtcatcgctaggactagaattttggtgcttacacaatgtgctgactcccaaatcgtaaatttctaccagatgtttaaagtaaaagaatgatgggaaatttcattaaactattaactatattcagtggtttcaaaatattaatacaacattgatatctttagtgcattatcaatgtattcttggagacaacatgtcaattaaattgtctcttattcaaatgttaacttcagtttttaaaatttaaagctagtctgctgattttcaataagagctgtctaatattgtgaactagtgaatttgaggagataaaagtggaaattataggtctgcagagtgtagcattgataaagagggggccatttcttccaagtcagtaaagaaaagtgatgaaacataaactggaatttttgtgattctactgttgcatgaccttataacacccctgttttaattaactacggacctgaaataataacgtatatttctaatccactcacaggaatggtaggtatattagttagctagggctgccatgacaaaatacaggctgagtggcttaaacaacaggaatgtattgtcttacagttctgggtgctagaagtccaaggcaaaggtttccataggttaggtttcctctgaggcctctctccttggcttacaaattgccgccttcttgcaatgttcttacgtggtcttttctttgtacacgcacaccctggtgtctttattcccatccaaattttctcttcttataagggcatctgtccgattgaattaaggctcatcataatggccttattttgacttaattacctctttaaagaccacatccccaaatatggttacattctgaagattagaatgtcaatttatgaattttggacggacaaaattcagcctatagcagagggtctgctttgcaatgattatgcactattactcaccaaggtagtaaaaattaagcaaacatttatatacacaagtttttgaggggataaagcctacagaatataagaacaaaatattttcaagaatgcctgtctgtggttctttcattaattcacttcttcattcatctttattgagtacgataatgaggcagggaaaatataaccatctgactatgaattgacctggtgcttgtagacatatgtggtttaacagttttccactttgtgtacccctctctcataacatgtagcatactctgctagaattattgattgattaacctcattgtctttctcactagatcatgagtactttgagggcaggaactttatctttcatctttcatcctgaagacatggatcagcatatgtgtatagtaggagaacaataaatagttttcagaatgaaggggagaattaattttttcatgaaaactagatgtcattatgtggagaatttatcagaatgccagactggtaaggatgttcagagacacagtagttgacctaagactaacctaaatctgtttgtatcacagaagtgtaccaatgcttgacatacattggataaaatgtttatttcctatttctctgtattgtttggccacatgactattgcaaagctcataagcacaaaatttgcacaaaacccctgagagatgccatccatggctacaaatacatgttttgattatattaaagtaaaaaaattgatcaattattttaaatattcaaggtagttaagtgaataaattctatgtaattacaaccacaaggttggtgcatattttagaaataaatgcttgttttactatgagaggaaaactgcgaatggcacacgacctaaacaagggcatcctgtttgcttggatgaaaattccatccccatgtttactataccttccactctcattcaaacctagaacaggagaaaaatagttcgagtttaaaaacaaatccagtagagtttaggaaagtttgtctcgtataccacacctttaaaaggctattttgcaatgacaatattcttgtattgccctctctatttttccctccctattgtatacatgagcccagcaacttctagaatatactagcacatatgaaatttttgaatatctatttcatgtagggagattagaaagtcactttctgccacttgtgtagctctattatgcaaaaatcaagaggatgcagatcataaatcccattagggtggaactctggatgtggaaaagactatatagataattttaagagatttcccctcagctgaatcattgctataaagttaagcatggtttttaaaatataaatcaaataaatggtttctataaaggcacatacctttactgtaaactgaactccaacaaacttttgagtggacatttctcaaatacagcatctattgaaaacttcctctgaaaaaacatttcataaaaattgaagcttgccttacatattttcatactatgtggttttaatgaccgttgtattccactctatcaccataaataaatatgtgactttaaaagatatgttgtaaataaaattagctcgaaaatactaacactaaccaaacattaatcacagaatttaaggagactatcagagactaattcagaaaataaaaatattgtaaaattactaccatgaaagctctaagaaaagttcatgataatttcagtgatgctaaggctacagaccaaatataaacttagaaacaaaagtatttagtctaagacaaattaaatgtgtatatattaatttattttctctgtttgatgggcatagaagcccatcaatactctgaatttatattttattaatactctcacaatttactttcatatgtgacttactatgtaatataaaaaacaaaagagcttgaaaaactgagatcagagggcaacaataaaatattaatgctaatattatcttgaatttttatctatacatatttaaatgttgttatcctcactgaaatttgttactaatcagtgaaactttagtatttacctaaattagttcttcttataagtagctcaatctccataataggagatagactataatttgtactttagcataaatattcttctaaaatcattcaccgttttatattgtaattgactgaaacaatataaagtggcttaaaatcattggtatattataaaacctatgtcagataaaacatggcatctgtgaagtttgggaattataacccagaacagtgtataattcaaaacagatacctgaaattatcttgtacacatctcgctatctgctatatctcatcacataaaatgcatagtagatgcacaaagtagctgtccaacaaatacttatggaattaataaatgaaggaatgacaaaaatgcttttcctcaatgtgctaagtcaaatacatgtttccttttataaaaatttaactatatgttttagatttagttgaaaaaatctatactggaatttacataattacataatacatattttaaagtattattcccagtatttatgaacattcattaatgagaatggcttctacattaaaagatcagttagcctctgctatttttgataatgatttaaacttgttaattcttacctgtataatgcattctcctttacaaaatgctggtatggccacttgttttatgttatcctcacaacaattgtaggtatagatgtgataaataatatactcttcctattctgtttttctttttaacaaatgagaaaactgaggcctaaagctccagtgattcactcatgtttacacaaataactctaaactggcgctcagctcttgctaattctttgtctcctcttttgttttgtttttgtttcattttgtttccctaaaccataatgccatccaatattatttaaagtttgcctgcctgcttttgcaatggttcttagctttccacaatagcaagtgcatcaaagaagaaaaaggaaatgattatatggttattaatcaaactcagatatggctagtaccacctttataagtgaaacttatataacaatctcagtttatgtcagtctcttatcccagtgtttaaagttttaaggactgagctgggaatgtgaggaggcttttgcttttcattttgtactctactagttttaatttttcactatgtgcatacatctgcaccccaacctttaaagaattagtttcctgaaaaaaaaggaaaatgcaattcatcgtacaaataaaagcataatcccttttattaatttttagctaacaaacacataataccatcctattccaggtactgtttttaaatgacttgtatctaaatgtaatgttaacgcatactttcgatgtgcataaatatagccaagcagtcctaaattcagataaattatcttccatctactgtatataattatatagtatttcctaatttttataaaatatggtttgtgtgtatgtatactgttactcaaatgaggttttgttgtttttctctcctcaaggtcaaaaacaatatctcactctatcttttgtgtcttttgttttttgatttttttttttttttttttttttgtctgctttgaacagtttttaagaggaaaagaagaaaaggtgtttgggggttacataaaaaaagggagaaagagacccaaatctcctgtctcttttatcacctacaaactgtattgattttcactttcctttcctaaatccatgctttaaagacattgtccatctaagaaacatagagtcccaaagcacaagttttgatgtagtgagcacccattgattgtaccttgaagtggatgtaggtaaacagatgacagatagatcaggtagatatatagatatagatatagatagatttatcttgaattttcctagatcccattaatctgaatgtacaaataagtctcattagttctaatatttgtatttcactgcctcattgccctcacctgctgtagatgatctctgcctccagcaaactaatcctcatgcatttctggggagtccatatgggttttctcacttgcacttaggatcaagctggacaccaattggctaagtgccacggttactccactgggcatctccatgtcccttctctggataaacaccatcatctatgggcataaggagcactgctattcttccattgctgctccaccaggtacctgagctctcccactgctgtgccaggtggaatagttttccaccaggggccaccttagatattcctcgtcaggtgagtaccaggactgctttgctaggtagagctgtcccagtcgattctaatatgcccctctgctgttatatctgtatcactgttctgtattctgctagtaccaaagctgaatgagactatgttaaaagtagtggtggaaaaatgtctttcttccttgcctccctctttcttaagtgagtcctaaaagaatactgagtagattttggtatcttaaaggtttaacaaaacagatcttctttgttttactctaaatacaaatctgagtaaactagccaaggctctcagaatgatctctctcttctgagaaccagggcaccatacctggctccgatttctctcatggtgaattcttcaaaatgttttccagtgcatgggctttcgctgggttatctcccacgttgttcacaatgttcagagatatctgagttaacagcacacccagaggtgttccctctttccatgactgtcccccacaaccccacgccaagaatgccactccccagttctaatggcagtatgctgctggtagcctggccacctgtctcagtccatttagtgttcctataaaggaatcacccaagactgggtaatttataaagaaaagaggtttaattggctcacggttctggaggctgtacaggaagcatggcagcatctgattctgaggaggcctcagggagcttttactcatggtggaaggtgaaggggagcagatatatcatgatgagagaagaagcaagagagagagagagaggaggaagtgtcaggctctttttcaacagccagttcttgtgggagctaagagtgagaactcattcactcccatgagaatgatgccaagccactcatgagggatctgaccccaagatccaaacacctcctaaaaggctcagcctcaatgttggggatcaaattgcaacatgagatttggcagggccaaacaaaccctatccaaaccatagcaccacccaatttgccagatatacccaggcagatctaaatatatcttacactcacaatcaggtcctccttttatgagataccaaagatgttccattagggttctcagacaaacagaatggagaaagagagatttattgtaaggaattggctcacatgactgtgggagctgacaaatctaaaatctgaagtctgcagggcatgttagcaggctagatatccagggaagagttagtgttgtagtcttgggaccaaaatcttcagggcacgtattagtctgttctcacgctgctaatagagacatactcaagactgggtaatttataaaaaaggaggtttaattgactcactgttccacatggctgtggaggcctcataatcatggcagaagagcaagagatgtcttacatggcagcagacaatagagaatgagaaccaagcgaaaggggaaacctcttataaaatggtcagatcttatgagacttattcactaccacgagaacagtatgggggaaactgcctccatgattcaatcatctcccaccgggtccctcccacaacacgtgggaattatgggagctacaattcaagatgagatctgggcagggacacagccaaaccacatcagggcagatgagaggtttttgttcctcatgacacaaaatgtggtgtcttttccaacaccacttcttcaattctctgacactcactaggcatgctatagttcagctcagttctgacagtaactacctggagttagagtaagactccatagatttaagagcccagtcccacaagactaccttcccttcagaggccaggcacaagtattgagtccccactttagccacaattctctccagctgagctacacagtcttgggttcccacaaccccctcttcagggttgataatttgctagaatgactcacagaactcaagaaaatgctctacttactattgcagtttattttaaaggatgcatataaacagccagatgacaaacctcctcaaattctgtttaggggcttttaggaggtttcatgacataggcatgattgatcaaatcattagccattgatgattgactcaatttccagccactccccttctcccaagcggttgctgattgagtagtgaagctgaaagttccaagcttctaatcaaggtttggtctttctggggaacagcccttattttgaagtagtctaggggccgtctgacagtcacttaattagaacaaaagatgctactatcatctttatcactcagaaaattccaaggattttaagagttctgtgccagaaacctggtacaaagaccaaatatcttcttatatcactgcaggccagcagactggaaactcccatagaatttttatcatgcagtcttgaggcagaattctttcatctttgggaaatttcaatctttgctctaaaggctttcaactgatcggatgtggccaacccatactatgtagggtaatttacttaaagtcaactatctataaataaatgttaatcacatctaaataataactttatagcaacatttagattggtgtttgatcaaacaagtggataccatagcctggccaagttgtcacacaaaagtaaccatcacagatgtattattttatttaaaatcatcagtattatatgaattaattcagaaataaaaaaggtgttgtcatagtgtgaacacttataagtgtctttcccacagaaatgtcaacagactgtgatttgaaaattgctgttttaaaagagaaaagctcatcattctacagaaatgattcaaagatagacaatccattaaatatcttataatgggccaaatactactagttgttaatttacacttgcaacatcaaacactttaccagctttttaacatgcaactgttgcatatgatgcattgtgttttttgcaagtaggtatacagcataattctaataggatatttatttacaacctaaccttacaatttaaagtctgctactccattgtgctcatcctacccgctgtcttcttatattcaaagctattaaggagtacttgctcagcatatcactccaaattaaactgcaagacattttatgatgaattaaatgggtgacgctctcccagcctttgtaactactagagcaagtatccaagaagcagacaattttatcacaaaattctgattgccaagttgtttttattaaatagacatacagtagagaatttaatcttagaaagcatctaacataaacacagatttctcgttttatagatgaataaactaagatccaatgagggcaactatttttttccaagttcatgcaggcagctaacaccagaacaaagactaaacaaagctcttctaacttctccccccatttttatcatccattgcattcattactacaaaattactacaaaattattagcctggtctttaatggtggccccaaagaatggtttttagtattacttccttcacttctttcgtatgtcctgtgctccagctaaactgaactatgttgaactaagctaaacatttctccttaagcttgtactgcattttgctacagtctttttgccaactcttcccatccagaatgtcttcactctctatctccactgctttaaaacctaagcaattttcaatttaagttctatctcctttttgaagtattgtatattcttctagccagataaaattctaggaaaatattgtcatacttgactgcataaagatttaaattgtctatatagcaaaataaaaccattattgaaatgataaaacaagtgacaaactagaacaaaatactttatagcatacttatttaataaatatctattgatagcttgctaagtaataggcactatactaggtgctatatccaagtaatgttgacttattagctttcaattagaaaaagagaaacactattagatatgggtcaattagataaacaggcacatccaaaaagaaaaaaatatgtaaatatagtcacagagataataataataataataaatgagatgctacttaacatttttcaaatgtgtaaatattttttaaaattagatttttccatattgattagaagatggagaaaagagctctttcacataatgctgctgtgaatgaaaattggcaatttatatcataatgtgccacagttttgttctgtatggtctcaatcccccctgtaaatgtgtgctctacttttctctaccttgtcctgagctttagcctctggattctctttgggttctgccaacgtaagacacaataaagagaacaacagacaggagggaatgaggccgaagtgtttattcctcaggctctgtgcttgcaagggtccccaggctctgtgcttgcaagggttcagatgggcagtagctgttcctccattgaggggaggcccttcctacagtacagctgtctttccagctggatgtggtcctcagcctaaggcagcaatggcttggtctgtgtttagccactagctgcgttcttattcttgaatgtgccccttaagcctggcccaaatcctgtaaatagtccctgacatatttctcttcaataattccatttcagtgtgccatcttctcccttgtcaggaggaccccaaatgatccctctttgactgggaaattctacttctaagagtttatgcttaaggtgtaattaagaatgtacccaataatacagtaatccatattaaatgttataatagtagtaaaaatgacactagtgaagcacaaaagagaaattaatccaaactgaaagagtttgagaaggtttcttatagggtgtggcatttgatttgtgtcttaagggtagcatgagactatgccaaaaaagaaatgtgtatgtcttgccacccaaaagagatatcttggccattgaggatagagattcattactttcttatgctatataaggcgtagtatagggctaggttgaaatagtattaaaataatatttaaggattgattataggttttcattgagaaccattctcaggtgatactttactaagctgacaatagacttagcactgcctggcaaacagcaagtagcagtcagtgatatagccatgattattactgaattaacagcatcttaatcttcactacgatatttgaaagggaacactgattcataaacctactcttttcctgccacaggtagtcaggaacttattattcttattatgtctcattattaacttctgttgcctaacaagatattatatattgtatgtcacatgaatattttcttacaaagtattaattgattcctaatcttgttaaagaatatgatagtagcaaatatccaactaattctgagagaaaaacctccagttttgcaagaaagatttagccaagttatgcaactaagtttgttcaaataataactctataaagttatctcgattatctcctctttagtttatgaatcgaaagcattgatgaagatcaaaagctaactgatgcctccctaattctatatctatccttgtgcagaggcaaagtaggggagtcagtaggatgtttgtgtgtgtgcgtgtgtgtttttgtatgtgtgtgtagatggagacagagaaccatagcaagatagagagagaacacgagaggagactgagagagaaggaaagagggaggaagggatggatggatgaaacgaggggctttctctcattttatatcataaaagtaaccaagaaaaaaatcctgggttcaatattttataattattacaaatggggtattagagatgttcaggaagccagagtagaaggcagctagctaagaatgctgtcagcctaaggagtttttcatggacgcctttttattctaaccagccacagaagaaaagagggaaatgaagaagcatcatccttcactatcacaactgacaataagggttctcccttacctcccacccccgcccccactacacacacacacacacacaaagtagtgactgaaaaccctcagcaggctgggctcccctaccacatgccacctgctgcaaatgtgttggaggcaccaggtcctcctttcttttttgccagttttcttattgcagaaaggttttactattcaacaattaggagtgtccaaggtgttaggggtcataagatacatccttgttctcaaagcgcttataacactgtaactactgatgactggtataaggatgcttacaagagaaatttattaaaagggcaactcagtagagtacaaactacgcatatgttgaagagagtcaggagatgtttcatggataatgcaaacattgaacagggttttcatgaaagggagggatgtggatttctctgataaggtggaaaacataagcacaaatggaagaatttgttgagtttagtatgtggtttgtgttcagttttaaatataagtccttatcatagcaaagcgatttcttttctttttgtttttgttttttccttttttaaattattttactttaagttctagggtacatgtgcaaaacgtgcaggtttgttacatatgtatacatgtgccatgttggtgtgatgcacttgttaactcgtcatttacattaggtatatctcctaatgctatccctcccctccccgcccaccccccagcaggccctggtgtgtgatgttccccaccctgtgtccatgtgctctcattgttcagttcccacctatgagtgagaacatgcggtgtttggttttctgtccttgcaatagtttgcccagaatgatggtttccagcttcatccatgtccctgcaaaggacatgaactcatccttttttatggctacatagtattccatggtgtatatgtaccaaattttcttaatccagtctttcattgatggacgtttgggttggttccaagtctttgctattgtgaatagtgcggcaataaacatacgtatgcatgtgtctttatagcagcatgatttataatcctttgggtatatgcccagtaatgggatagctaggtcaagtggtatttctagttctagatccagacacatgaaaaaatgctcatcatcactggccatcagagaaatgcaaatcaaaaccacaatgagataccatctcacaccagttagcatggcgatcattaaaaagtcagaaaacagaaggtgctggagaggatgtggagaaataggaatgcttttacactgttggtgggactgtaaactagttcaaccattgtggaagacagtgtggcgattcctcaaagtgatttcaactctacagatcagtttgaaagcacaggactggatctcagtgatggttaattgctcatctggccaaagaaaagcatgttgcaaggttaaggctcctatgaggaaaaggagagcaaggatgttcaggctgaataaagcccctgtttttattaattataaggtcagaatctggttctcctggaatcaaaatgctgagcaagcaattgtggagcaagggctacacaatggcagagatgaatgcaacctgatattccacatgcattctggcgcagctcattgcttttcaggcatctacgagaaacatatcaccccttaggtttgctgccgaagatgtgttctcactgaaccataacctagcagaggttctcaggttggaataccaaatagcaagatgatgtggtcagtgctacctatattgctctaaaatttttaaacatctaattgatgatttgtgggaaggttgcacagagagaagaaaggaaaaccaggaaaaagctgtgtttttaatttatgaaatattaagaagttttcggaagaagacccagacaatatgtattagatcataaagaagcaaaaaagtgctatgtaattttctgatggtagaaacaaataagaagatataaattcctcagtttacaccatgagtttaaagaaaatcatcacctacttactggttcattttgtaaattgagatcaatgaaattctctgaacaacagcatgaaatcaatcgtaaaatagcacataattcatggccagtattgtaaattatagtttgcttgacagtaatcggtaaggtttccatgcactgggatgcatttccttgtaacacgtctaaggataatgcctgtggatccatttctaatgcatattagagtgatctgtttttccctgtccacaactccctgtgtttgatcttatgcaaatgatgcaatcaagcaaatggaaaacaagatgttgttgctcaggggctcttacaaacagtggccttatgttttcagggtttccccaccctccatttacccaactcagatttgtgtacatacctgcaattgtttgaatccgttgatccatttgtgttgcccttgaagtgcctaatcacatctatagagacatattaccaaatcagttgcagttaagctaggaggagagttgtcattactttcctctttgctttaaatttcaaattggtggctttgtttatggcttcactctcaaagaatttatcagcctcacttccctgtaaccaatctttttttcatttctttttgttaactgtttttaaaaactctctcattccattcatacattttacacatgactactccttccccccacgcccaacctgatgcctcctcctcttctccatttttttccctttccctcatcatttcctcctgttttaccaagaatttcccaatcagatcaccgtgcaactttctctgccacatgtcaaattaggttctcttctctctctctctctcttttttcatgctttattattcaaagaacactagtaacatttcatcttcttatggaaatacattgagaataatccactttgggatggacagtacaggcataaaaacaacttggaactcaaaaaagctatttaatcacaatggttttctttgtattatgtttacagttttcagatttttaaaaccaaaagaaaatacccaatttctattgtagtgactttcatgtgagtccgtgtgaagagaccaccaaacaggctttgtgtgagcaataaagctatttatttcacctgggtgcaggtgggctgagtccgaaaagagagtcagcgaagggagataggggtggggctgttttataggatttgggtaggtaaaggaaaattacagtcaaaggggggttgttctctggaggccagagtgggggtcacaaggtactcagtgggggagcttttgagccaggatgagccaggagaaggaatttcacaagacaatgtcatcagttaaggcaggaacaggccattttcacttctttcgtggtggaatgtcagcagttaaggcaggaaccggccatctggatgtgtacgtgcaggtcacaggggatatgatggcttagcttgggctcagaggcctgacattcctgtcttcttatattaataagaaaaataaaatgaaatagtggtaaagtgttgggacagcgaaaattttgggggatggtatggagagataatgggcgatgtttctcagggctgcttcgagcgggattaggggcggcgtgggaacctagagtgggagagattaagctgaagggaggtcttgtggtaaggggtgatattgtggggttgttagaagaaacatttgtcatttagaattattggtgatggcctggatacagttttgtatgaattaaaaactaaatggaataagagaaggagaaaaacaggtataaaaggtctaagtattgggacgactcaggacatctgattagagagtgcctaaggagattcagcatagtcctgccagcaaagattatttatttacttcaagagttaagagtggcagtttggggatagcatgaggagatgtcagctgtgatggcttggagaaacagtgtaaactggcagtgtaaacaagagcaggacatgtatgagtagttgagaacggtgaataggagtatgactagacagaagatagtagggatgacaagtttttttggggcacagtctaagttggtctggtgtctggaatgagactggggcctaataaaaaggagcgtctatacaggagctcaaatgggctgtactttgtagcattccgaggacaggcctgacttctgagaagggaaagtggtaaaagtattgtccagtcctttttaagttggcggctgagcttggtgaggtgtgtttttaaaagacctttagtccgttctacttttcctgaagacggaggaccgtaagggatataaaggtttcactgaatactaagagcctgaaaaactgcttggctgatttggctaataaaggctggtctgttatcagactgtatagaggtgagaaggctaaactgaggaattatgtctgacagaagggaagaaatgactgcggtggccttctcagaccctgtaggaaaggcctgtacttatccagtgaaagtgtctacctagactaagaggtattttagttatctgactaggggcatgttgagtaaagctaatttgccagtcctgggtgggggcaaatccttgagcttgatgtgtagggaagggcctgaataatccctgaggagtagtagaatagcagatggaacactgagaagttatttccttgaggatagatttccatgatgtaaagaaaatgagaggttctaagaggtgggctagtggcttgtactgtagcatagcctgcctttgctggtgtgtgatgattaggcctggtggaactgccatcaataaatcaagcgtgggcgcctgtagtcccagctactggggaggctgaggcaggagaatggcgtgaacccgggaagcggagcttgcagtgagccgagattgcgccactgcagtccgcagtccggcctgggcgacagagcgagactccgtctcaaaaaaaaaaaaaaaaaaaaaaaaaatcaagcgtgatcaggctgaggaacaggaaagaaggaaatatggggaaatggggtgaatgtcaggtggatcagagagatacagtcttgggtgtcaggtgtggtatcaggaataatgtgggaggctggattgaagtccgggccaggaacaatggtaattgtgggacttaacaaagagtgagtacagctgaaggagccgtggagcagaaagtatatgcgtcaggtatgaggaagaaaatagattttggaaattatgagaaatgtagagagtaagttgagcatagtttgtgattttgagggcctctaaagtattagggctgcagcagccgctgcacggagacatgatggctaggctaaaacagtaaggtcaagttgtttggacagaaaggctacagggtgtggtcctggctcttgtgtaagaattctgaccgcactaaccatgcctatgaaggaaaggaattgttgttttgtaagggattgaggtttgggagattaatcagacacgatcagcagggagagcacatgtgtttttatgagaattatgctgagataggtaacagatgaggatgaaatttgggcttgattgaagtaatgggggctatctgtgaagctttgaagtacagcccaggtaatttgctgagcctaatgggtgtcagggtcagtccaagtgaaagcaaagagaggctgggatgacgggtgcaaaggaatagtaaagaaagcatatttgagatccagaacagaataatggattgtggagggaggtattgaggataggagagtatacgggtttggcaccatggggtggataggcaaaacaatttggttgataaggcatagatcctgaactaacttgtaaggcttgtctggttttaggacaggtaaaatgggggaattgtaaggagagtttataggctttaaaaggccatgctgtagcaggcgggtgataacaggctttaatcctttcaaagcatgctgtgaggtgggatattggcattgagaggggtaagggtgattaggttttaatgagatgttaaggggcgcatgatccgtcgccaaggagggagtagaggtatcttatacttgtgggttaaggtcgggggatacaagaggaggacgcaaaggaggctttggattgggaagaggggcagcaatgagatgtagctgtagtccaggaatagtcagggaagcagataatttagttaaagtgtctcagcctaataagggaactgggcaggtggggataactaaaaaggagtgcttaaaagagtattgtctatgttggcaccagagttggagagttttaagaggtttagaagcctggccgtcaatacctgcaacagttatggaggcaagggaaacaggcccttgaaaagaaggtgatgtggagtgagtagcctccgtattgattaagaaggggatggacttaccctccactgtgagagttacctaaagctcggcatccgtgatggtctagggggcttccaaggcgatcgggcagtgtcagtcttcagccactaagccgagaaggggtcagtcagagaaccttgggccagagttccaggggctctgggagtggctgccaggtgagctgaacagtccgatttccagtggggtccggcacagatgggacgtggcttaggaggaatcctgggctgcaggaattccctggcctggtggccagatttctggcacttgtagcaagctcctggaggaggaggttctggaggaaggcctggccgctgcagttcaggcatttggaagttcttgtgtgctggagatgtggctggggttcgtctcacagtggaggcaaggaattgcaacttttttctattattgtacaccttgaaggcgaggttaattaaatcctgttgtggggtttgagggccagaatttaatttttggagttttatttaatgtcgggagcagattgggtaataaaatgtatattgagtataagacagccttttgactttttagggtctagggctgtaaagcttctcagggttgatgccgagcgaccatgaactgggctggatttttatatttgatgaaaaacagcctaaacgctatctgatttgggataaagaaaaaggagcattaaccttgactatgcctttagctctagccacctttttaagagtaaattgctggtcaggttggggagggctagtcatggaacgaaactgtaagccggactgggtgtaaggaggggaggtgataaaaggattatagggtggaggagcggaggctgaggaagaattgggacctagcttggcctggcgaggagcagtctggggaggaggggagaggtcagatgggtctgtagaaaaggaaggttagaaagactcagccacgcttggacgcttggggttgagactgaggggacaggtgggagggaaagaaggaagatttgggacgagttgcactgggcacagagactaggaagggaccgatgtgtaaaagaatgcctagacgtcaggcacctcagaccgtttgcctattttatgacaagaattatttagatcttgcaggatgaaaaaattgaaagtgctgttttctggctatttggaactactgttgagtttgtattgtggtcaagcggtattgcagaagaaaataagacacttagattttaggtcaagtgagagttgaagaggttttaagttcttaaaaacacaggctaagggagaagaaggaatggagggtggaaggttgcccatagtgaaggaagcaagcccagagaaaagagagagtagagacacggagggaaggggttcaggggttcttaccctccagaaaagtgggaaagaggttggggcatggaaataagggattggggcacagagatataagaggtcagggtgtggaaataagggattggggtgcagagataagaggtcggggcacagaaataaggtattggggcacagagatacgaggttgggatatttgcccctcccccagaaaagtgggacttgctgctaagggtgaaggagaagaggttgggggtttcttgccccccagaaaggcagagaaggggtgaataatcagagaggcgtccctgcaatgattaaacaccaagggaaggctccttcccagtccgtgactggcgccagagttttgggtccacggatgaaacatgtctcctttgtctttaccagaaaatgaaaggaattgaaattaagagaagggagagattgaagagtggaaaggagaaagtggttgagggatagtgagaaaggttggagaagagagtaagaagaggttgcttacccaatttaaaattggtgagatgtcccttgggctggtgggtctgaggacctgaggtcgtaggtggatctttttcacagagcaaagaacaggaggacaggggattgatctcccaagggaggtcccccgatccgagtcacggcaccaaatttcatgtgcgtccatgtgaagagaccaccaaacaggctttgtgtgagcaacatggctgtttatttcacctgggtgcaagtgggctgagtccgaaaagagagtcagcgaagggagataggggtggggccgttttataggatttgggtaggtaaaggaaaattacagtcaaaggggggttgttctctggaggccagagtgggggtcacaaggtactcagtgggggagcttttgagccaggatgagccaggagaaggaatttcacaagacaatgtcatcagttaaggcaggaacaggccattttcacttctttcatggtggaatgtcagcagttaaggcaggaaccggccatctggatgtgtacgtgcaggtcacaggggatatgatggcttagcttgggctcagaggcctgacagtgacgacatagcagtcagatttcccaaaccagaaatctgacctaacaaactacttttttggtgtgaattagcttatcttaaaaacttagaaaacatttcaattgtacctaggttctgaaaatcttgtctgtgtggttatgataagcataggtgaggtgctggttgagtatgtggcattcataaatttcagtcttcaagacatatatgtatgtctctatctctgtgtacagttatgattttatttctataattcagtttaatatctgactttactcccatgcaacttagtagtaagtaaatcacagtcactttgggggtccccccacctctactaattatgtaaaagcttctggggtcttacctagttccttagcatctggagtgtggccacccaggatgctttctttctctgtgcaaagggataactattgagacaacccttccacattcagtgggtatcctcagtgcttctacatcacacttgggcaactgaaatctttacaaggttttctgtggccctgcctgaatacagacaccaaagtctttctttttgctctggtcttgcccccgacctgggactctaccttgaaaacaggggtcagggcccctccttcagagagcttgcacatttctacttccttttatccttattccatcaggcagggaattctgaattagggaagtggaagactccatacttcctatttctcccaacattatatctgagggaacagagtcttccttctctgttccctcagtcactctgtccagaagatttttttgtttttttttctgcctcctgaccagtcacattctgttttacagagaaatctattttatagttaaattctgattttataatttaattgagtgtactagttcgttttcatgctgctgataaagacatacccgagactgtgtaatttgtaaagaaaaagaggtttaatggacttacagttgcatgtggctggggaggcctcacaatcatggcagaaggcaaaaggcacatcttacatggtagcacacaagacagaaatgagagccaagggaaaggggaaaccccttatggaaccattagatctcatgagacgtattcactaccatgagaacagaagggggaaactgcccccatgattcaattatctcccaccgggtccctcccacaacatgtgggaattatgggaactacaattcaagatgagatttaggtggggacatagccaaaccatatcactgagaagcatttagataaaaattaaatgcagaaaacatatagggtcggtagcagggaaggacggaagaaataaaataggttagtatgacaatcagattgatctcagtacccattgaacaaatcctgagcattgtaggagtttagaagaggaagctctaagggcttcaatgtaaacccttacttggttcctcaagagaattgtccaaactatgaaaggagaagaaggaaaaacaaatcaatataatgaagagagtcacaaaggaacaacataattatggctgaaaagttccaaaagcccagttcaaactggaaaacctgaaattatactagactctttcagtgtgttcagtgacatctctcggaaacatcttagagatatgagaagtattagagacataagatgataagatttatccagaagtgggaactgggatagccatatagaagaggactggggatgtgaagaaccctatgtgacccagggagtatggctttgtaatggatgatcaaatttcattgatgagggaaatgaaactattgaaaatatctgggaataagaaggtaccaagagactggacattgtgtagcggcataggagtgattgcattgatgtgacaagtggaagaggtgggaagtaaccagtttgtggtcagagagtgcaggatttagatttagaatcttggaaatcattctgaagattatgaagtagtaggtgtaactatgctgaatgttgaataaatgaagtagaggtgaagggcattgcatttgaggaagttaaagtaaagccagattcagagatgagtcattattgaggatgttagagttgccaaaaagggattatgattgaaaagaaaactgagccaatgctgaagtcatagaggagagaagcagtgtgaccggagatgtgatgggggcatgcgttaactaggttggggcatatcttcttttaaataatggattgatattaactatggctattttttctccatctatgatataaatatatatcacaaaaaatttgaaaaatatatgtaacaaaaattaaatcctctatatgcactcactcagaaaaacattgttaacatttggtttaccactatctcctgttttgtttttattttttttattgtttctttcttttacaatgaagcactggtactttaaaattatgttttggcattcagacaggtacagctttgcctttttctcgtatttaatggtaaatctcctttgtcttacaactatagacccctacattggcccaacaattatattcattatattcttggagactttaaaacatgtttagacattactatatttctgagaaaaaaaaatggcagcctgggtagagggcatggggatatccttctggtcttgctcattcatttacaacaagtaaaattatgcgagttagtcatcacaccattcctggagatatcctgctgaacatgataaaaaatatttatctgaactcaagaagtttacattctcctgggaaggatataatatcaagatataaatgaaaaggcaatattgaacttgttttagtaattatgatatggaactaaacaaggtgatataacaagaacctggggatgatggtggccatattgttcaattatcaagaaagaccactcatagaaggatgaagctgaagcataagaaagagcaatccaagtacaaagagagagaaaatagatttcagtcagaaggagcagcacctgcaaaggcccagaagtgtgaacttgttgtgttagaagaacagaataatgtctagtctagtgtatgaaaaaaatagggagaatgttacatcaaataggatctcattgaccattattagatttcgttctaagagcagaagaagggtactacagggtgttactctgaagaatcaaaagatcactcatggtaaatggtcttgttttcttcattgggaaaattgaagtagttagaggataatgcccatagactctgctaccatctacccacctaccagtattggcacccacatagtctgcatcccctcccattactatagattgtctctgttccaagttcaactctttcacttttgaactagattctcctctttcacatattcaaggacaaaactccagcaatttttttctctttcatccacttcatagttttcccttcactagtgggtcatcccatcacatacaacaaatttttctctcatttaaattactttaaaaatcttctcttgattctacttaccttttatctattgctacatttatctgttctcctttaccacaaaactttttgaaaatgttcttttattcactgtttctaattcctcttctatttccttataagcccacttaagtcaggctttagtgctgacaagttcactgaaacttcaattgtgcaattactgatgactgccatattgttatacccgatggccgatttttaattctcatcttatttcacctttaactcttaaaaattacttcctttgactttcaagacaccataatctcaatgttttcctcataccttactggtcactctctgtctccttggttgatttctcctttactcattggcctcatatgttggtatcccagggttttctcttttatatctattctcactccgtttgcactcctagccatctatatgatgatgacttaccaaattatatatctcaagccatgaactcttcctgtaattccaaacttctgttcaaatatcctgacaatctcctcttggttatctaactaacatagcaaatgtctaattgacattcattatatgaattcttatcttcccctccatgccttcctcaaccaataaaatggttactttatccttccctttgctcaggtcaaaagccttggagtcaactctgggtcttctctttcatactctacctacaatgcactgggaaatcctgttagctttgcctttaaaacatattcagaatttaaccatttcttacttgattattactggcccccacttacttgatattacaaatagcctcttcagtgagatgtattcttatgctcttgctcactaccatctatacgtctggcagccaggatgatactcatgaagtccatgtttgattgcatgacagctctgttcaaaatccttagtgtcttcctaagtagaacctcttagattaaaaaccaaaattcttacaaagacctacaaggcctgcatgaactgacccctcattaaatctctaatatcatctctaacttacttcttcctaatttgttctgctccagccacctcagcctccctgctagtcctcaagagtgtcaggcatgtccctccttccacagctttgctctgcttgttccctctcttggaatggtccaacccaaaaattcccataacttttacactcatccccacttcaggtctttgctcaaaatgccaccttcccaatgaggcctctgctgactcttaactattaaaattacccagaacttctaattctccttcctctgttctgtgttttctgcagcagttttcatgtaatgcagcatgaacatcttaaactccgttacacattcactttaaagacatgctatcttctaaaatgcaacacctttcttacccataaacttcataataccttggataatctagaggcaaaccctaactagggatggaggatttgacaagctcaactaaactatttctatttcaatcctggctcactagccattctaaccctctcaagcaacatgagaggtatacttgttctaagtatactcacttcccatcctgaccgccccctgccccagtcccagttgttatagaaacggacacttcccactccatggaagaatccgggcacggataacaaatcctgaactaattgcttcaggaagctccttccatctgaggcggatattctgggtgggtttagggcttaggtgatcatagtcaccttcaacgcatgcagtttataggggaaaggtgagtggggcactctgtgataagcagacactgcgatatgtgataatatgatgatgcattcttgagatacctaagtcctaccttgagatacctaagttccagatatgcaagtctgtaccatggaaacatacgcaagcaagcatcgggcctttttgaatggagtaacttcttcaccacctacaagttgggtagctaaatccccaccccagcaaagtagaatgtaagaaagaaggaaaacctatcccactccaaagagttcactggccaaagaattttgtagcatccaatctcggttgcggctgaccaagacaatctgatatggctattatatatttcaaggtcacgtggatttggccacatggaatataatttctggctggagcatgttctttcagaaagttggatgtgttctcagttgaaacactataggttttctccaattgcactgaattacccatcaggaattcctctaagcttggtgacctccttggttttgctcctgcaacgggacttagagtcaaatccccagcttctctttttcagggaggacaaggaattcagacagatgagaacaatgagagagagaaaggtcaccagagagcgaagatgaagagaacagaggaatggcagatacaatatgttagcatataaacacattataattttggccaagattggccctgtcggtaggagtttttctttgcataaagttttctctcagtaaataatagtctactctctcggtagcatctgaggccactgctgtaatgattttttaacttcataagtttcctagaacgttggtccaaatgaaggcaccccagttatgtctcagtcgtgtacctatagtgcgactgttgctgccatctctcagcagtccctggcaatgccacactgcttcaccatcagcttcaaagtgtccttgaagtatatattctgactacattgaatgggagtgccccatctcaacttgcaaccattggattcctgtaggatagaatttgtaaagaaaacaaggtttaatcaaaagcattaagagtctcttcttgttgacaactttttgttctaaggtaaccatatttactgtaaattatttttttaatctctcttctagtgacctacatgtttaaccaattgattgtactttgcatgaaaatcaaagtgttctttccccagtttacttttgttatcagtgcaatgcaaaatctgtttgcctgaattaggttgcatttcattaatctcttcaatatgaaattgtggtggctcatggttaatgagatttaagaatctgtgttacttaaattgtgactaacttattttaaaagtatgtcagaaaataatgattgtttctagtagtgttaaagtattaatgattagtaagtcttggtacacctgactgaactttggttagattaccaagtgtaatgaagtgttcaggatatttcagaattgagttagtatattacagattagtttaatctaatacaagagaatgtggtatctattagaaagacagacaatataaaataccagggaagttcaggggagggagagattctttcagcctagggcactaccctagtctcatggtcatctttcagacctagctcgtttcattcattaattattcattcattcaaacacacatattcaaaacctacaatgtgccaggtattgtgctacatactaaggatgcaaaatgaatatattaccattcctgctcttaaggtatttagtgtatcatatagtcatgacacagtgtttttaagtgttaagctaaaagtatgtacaaagagaaagagaagaggctaatagctccatcttgtgctggggtgacagcaaggagtgttagggacatcacaaggaagaaacaggcatctgcactgcacctcgacaatttgaaggtcaaataatagtcaggtggtggacaggagaagaatggaatctgacaaacggaattacaagctcaaagtcattgttacaagctatgtattggcatttcaaaggcaactcctgttgtcttcaaatatgctttaaaataatttaaacatctcatttatttttaaacagagccattgaactaagactaaacttagcaaatgatttacctggtcacagacgttcaagaaaacagtaaaactgttaaaatgaaaaagtcaaaacaagagtttgattgacacttgtctatttaaacataaccaaagtatatttaagggatgaagcatcctatatgttattgctattgatttttatggctatttattcatattttaagccttatcttaacaattctctgagataggactatagtggaggagtgaaatctcctcaataagaagtataatgctgagtaaattcttgtttctccctatcccctagatttagcagtatttacaccccaccagtttctactaagtgcatgcacacatgtgggctgtacaaacagttcctgggtcctactgtacacagcacagctgccaccagaacacgtggattccccagttctgactgtcctggattctagaactatacacatacagtaagtagaaatgttgtctctctcacatgctggttcatgcaagaatctcagtgagttcaatcaggggaggagcttgtgacataaaattaattttattgtgattaaatgcatagaagtgattagttcagtggatctgggaacctttgattatcacttgccagcctaatttccattttgtctttatgcaatcaggctgagctacataggtacacagattccatgcaaacttcaataaacaaaaaactgaccactttcatgactgccttgaatattttatgtttggggcattatttgtaataatttggaattagaaagtatgtatatctttttgagtatagtccaggaccttcttattcccttattacctgcagttgatgtcagaaaggaagtttcacatataggcatgttctgatgatttctggtattactgattcttgtccatttcctgatacctgaggtataaggtgtactattgtgctgagctaaaatctaataggtctctcttatcaagagttaatacttgttcatatttatctcttctggactcagttttcttatctgtaaaataagagtttagactaaatgaattctgacatttattcaagccgaaaaatattatgattcagatctcattgttccatgtctaaattctcctgttggcttcattgtgcccctaagccaagccacgttacttagccaaaaagatttcccacgactcaggtgtttctcagcttaacaatttcctgtctgttctatgacttgcccttctcatttccactgctaagttgtaaccctcatctgaaatgccctctgttcttccttctacctatccaaatccaatccatctgttaagaataaaatcttatgtatctaagtagtgtgtcacttcattcaagaagtcctgcctgattttttcagcccttccagtcatcaatttcactgttttctctaattacatattaaccctgtgttggattcctggattttccaggacaattatattattccctcttttccccatatctaagttctcagaagttctgcttctgaagtttttgttctacagcttaaattcaaaataaatactcgcttatacatttttgtattgttagctaattaaaattacaggtaaccagatggcaggagccatatcacatttcctttttgcccctcagaataggcattggataactacttcagtgttttattttaaatgaatcaattttgagatttatgttttttaaaaaagtgtcacaaatccaagttcaaatgtgtcctttgaaaatcctgtatattttagttttgacttgaatgaatgataataatgtattttaccattcccaggtggaaacaaccaagaaaaataagtgggattctggaacgctatgtattatatatgtcaaaccatacacatgattttacaatttggagtgtcatctataacagtacagaacttttccaggatcatatgctacaatacgttttacctggtaataaatatctcatcaagctgggagtaagtttatttccatcactttctctgtccccattccttccacttcttctccccttcccgtggtccatcttttctttctctctcacttaaaaaaaaaaaagtcaaaatcttcatgtattgctgtttatactgaaaactctcttcccatcctaaatgtgaattctggtgatctaatacctacacatttattttatattatgcaaatgatagaataacaccctgagtcagtagattttcccaagtcaaagttgggattatcaagattttcaaaattacttgtagaacatcataattgttaagaactttttctaaagtgctaggattcataaggttatttccctgtggcatttgtattcatttaaaaaacaatgcacagtatgaaaatttagatcttatatttttaaatggaagtttaaatgaccgtcaaatattcttgattgttattacattctggtttatattatgctcctatctcagaagaacagtcacttaataaaaccccagaatcaacatagtttagaggttcccttagacaaacaatagcattttttaaatgcaaaaatagcacttttacacaaaggtcttttaaaagaccttgatattactgtggaatttatactcagtaattccttttgttttttgatgaaatataatcttttttaagtttaatagcacgtctgaaaataactgaatataaacatgagattgtccctatttgttttaaacacactcttcattttatagcaatacctatataaggatatttgctttgataaatgccatagaaaatattctgctcttgattatgaataaatttacatttatgtagacactgtgtatgcattcattttacttaacatgctcttgaatgctctaaatattataccatgagaaaataaactacactcaactattgctaactgtctgacttaacaccacaaaacaagggcaatcagacagtggttaaaaaaatactgttcaaaactgactccatgtgcctaggtgttctgcacagcagtttatgaaacagcactttggttatgtacagttttattacccattaagtaagaaatatactaacttgattttcaaatgctaacacagaaatacaaactattttcaaaataatggtagtatcaaaattaggaagagtcttaattttttggaagcaaccaaaactaaaccaaaaattgtgctcttggttgtttatcagaagtaggcaaatgacatagaacagattctcttcctagggccgtttttaggatgtgctgtgcagtcaatcaattcatatcaatctcctagattttataaatctataataccttgaaaaatacatactagtagattaggagtcctctgccctgagtattaattcagattttactacaaactgtgtgacctaaggcaaattcacttaacctcactgagttttattttcttcaagtctaaaattagaacattgaactaaatgatgtttaatgtctctgagccataaaattctatgatgctaaaaaaagtaatcccaaacactattctatggagtcaaatgctatctgtcagccgctgaatagtgttgatgcaagatgttataaagatgtgaaaatccttgccttaactcttggtagggaaataaacttgctcacattattttcaagttcactatatttattagggcagaaaataatatattttcagggaggattcaactaacagggtttttacttaactctgttaagcagtaaattaaatgaaccagaacattttaggttcatcctggttaattgagggattattgtatatttcacagtttcaatataataactggctttcaaggtcattagattagtagatcgagagcaggttctcagcaaagtggagttgcctttatagatcattttagcatgtcgactaagagctggaaaacaaaacataaagataacaaagcctttaagcagcatttggaatagaggaagctacacggggatttgaaccactatgatttaccctaggcttggagcaggtatgttacttcatgtaacgtcatttagttttcacatttgactggattataaactgctgaaacataaggactgaatctttcaaaatttgatctgcagtttcaagcacagggcctattggaaatgggaagctgagcaaacaattcctgaatgaatgatcaccaaggacatcatttcataaaggttctaagacttttgatatgaattaaataatttgcttggaaacactggaattaggaatggtgtggttccaaaacatactctttccactgcaaaaaaaaaaaaaaaaaaaaaaaaaaaaaaaaaaacataatatgttgctactctcaacaaaggctattttgaaatgtgataaaatgtgatagctcctaataaagaagacaatatgttaaaaataaaataaagaagctattaatacagacagctatcaagacaggtgttgcttgataattttcataccactgctagccatttgtaacttgatgaattctaagtattatatattcctgaaagattcctggaagtggcttcactttttaagtaattatggatcaagtggcctttttctttttcttcgtgctttaaaatatgttgcactcttaacatccccaatccctgtggacctgaaaacttactggaaaagagaatgctagttttggtccgggcacactggcttacatctgtagtctcagcactttgggaggcccaggtgggcagaccagttgaggccaggagttcaagaccagcctggccaacatggcgaaaacccatctctacttaaaatacaaagaatagccgggtgtggtgctgcaagcatataatcccagctactcgggaggctgaggtacgataatcccttgaacccgagaggcagaggttgcagtgatctgagatctgccactgcactccagcctgggcaatacagcaagactccatctcaacaacaacaaaaaaagagaatgctagttttggattgtcttaatagtcatgatttcaaaaataattgataaaattttattatttatgcattttattgtaccaaaattgaatcccttatttggccagatgttactcatcatttcaaggcagagttatgcctttatgaatttttcaaaatggctgtaactgagaaaagctataggcgatggttaaaacaacttattttaatggctctcaggctttcaaagaccttgctatttcataaaggcatttttaatcaaccccactattttgtttagtttttccagaccagaattttaatcagcattcagctgtattgaatgtagtggcctctggtgcgggcaggtcaaacaagatactgattggttcaatttcatttagatgatgtcagattagaccaattggaagcagctttaagaacatttattttcccatcaaaggaactaagataatgtcctgcttacttaggaccctctaaatgcatccaaaaagaatgtgggcaaaacaaaataaaataatttgcaggtaattctgttatttcagcagcctctttataaataatttcatttacaagaaaaatgctttcataaatgccttacattcttaagagatttctttgtcaagttactggtttatggatctcagatgacatagtagatgaaacagtccttctaaaccaaaggatgcttttacttatcctagaagacatcataaaatcctcaaagtaaattttaattcacactgtgttttaaaaatatatacttatatgttgtatagtatagaatttatttggggagagttagcaggggaaatattttagtatacaaataagaaaaaaatagtgacaagtagactatcagaattaaatcccagtgtgttacaagtttaacaataagaagctgcaacatttttcccttctaaggaaaaaaaatctgaaaaatgcaaatggatggattttttttctccctgagaagtgggaaaaatttgtctttgaccatttttcctttgataactcagctgtctcatatggcctcttttcctgccatattttctggtggacttttagcacatttgaaatgtctggggtcttcaactttttttctattttaatcgttgggcaattattttttgagctcacagtgacctgtcctaaagctttgagtcagagtttggccacatttgcaaagattccattctctagaggagtatggtttttttcttgcacagaaaggcacatgccacagctgagaattagaggaaacccacagaggttaattaggtacccaatcttaatgcaattttcatgctcaggccacaatttaacccatctgaaagttgcttaattaagctggtaagaaattatcctgaagacatgggctattgctatagtcttgtaatagcaagtgagattaatttccatgtttgttgaccataaactgttgtttatgcttataatgaagaatttgcaactagttgcaacaactttgcaaatagtagtgtactcccatatttaaaaaaaaaatctaaaaatcagtcagcttccttctgtctttggggaaaagaatatcgactactttaagaatcacaaaatcactcactcagtatcaaactgaaaaatcagagagacgcctaaagaaagagatgctttaattttttatcttagtaatatctgtcttacacaaaaatgagctaaatatctctgcttttttacattgtcttatgattttgctttattttctttttgattttggtaaaatttagtgccttttgaaagatttttaaactttgttgtatcaattgaaattgtaacttgaagagatactgaaccaagcttaagtatagttttcaaatatcattgttatataaggatataattactaatatttgctagcaaatatgggctgaaaaccccttaatgtatttatcaatttcctggagaagtgcttgtccagtaagtttaaaacattatttgcagtttattatgaaattgcacacggaagtttctgtaacattcatgttaccatttctgacattagtgatacttaattagggaacagagagttctgtgatcatgttaaatttgtcaaacatgttttaatgaagcctatctactctgacacataagtaaattatgtgatcctttaagccattaaacattcactcaaaaattgctttgtatttgttgttttatgagaaacattgttttatttaattttatttggtgttatgctataaacatattggtcacactgtagaaataaaaggcaattgtatttgctgcacatcttttcttccctagaagtcagttgttttgtcttaaagtagtcttcatcctctagtactttacttatgttatgtgtacacatgctgtgtgtgtgtgtgtgtgtgtgtgtgtgtgtttaattcactctgggaacctttgtgcaaggctaacttcagcagggctgtttatccagtcaatatatgccctacatctctaggctctgacttaagatgcttccttaattcatacattcataccatctcagttattctctaactattggggatggctatcttatgtcttaaaaagcaaattaaataaatgttaaatcttaacactgaaatgaatttattttggggaagtaaaggtagcactatataacaaaatctgaaactcttattatgaattctctttcctcaatgttcatgaaaacttttgggaccaagagtgaaatgagcatttttgcatctctgtttaggcttgcacaggtggtgggtgcacagtgagtgaggccagtgaggccctaactgacgaggacatacccgaaggcgtgccagcccccaaagcccactcatattcacctgactcctttaatgtctcctggactgagcctgaatatccgaatggtaagtgaactcttttagcctcaagttaaaaagatgattagcaaaggtaaattaatattctaaatggcagcttatatgtggtgcttaatttttaatgatcattttagcacataaaatacctaagatagtatcattgtctctagttggggagattgtggtttttaggctaacacacaattttggtggctcaaaagtgctcccttttgatagtttttgtgtactgcatctcattgtttaatatgctccaggagaggtgaagagagcaaacggggaggattcccaaagaatgccgtagtgagagtgacattgtattttcaatgactttctgtttttaaaagccattagttcttccttggcgaaggagagaggtggaaagttcatgtacatattgtgtcaaaacgcttttgatttaataagtttatcttaaaagaggccacttggaactctgtattttttaatatactatttataaatatttcaacatgctgtttttaaacaatgcatagattaaacatacatatatttatacatatttagctggaggcaagttttgtgcatttctaagcaatatatatgtttttgtacagtttagtgaattaagctagtcagttacgtttcactaaaataaaatctcattatgaagaatttgtaatagttttgggtagaaattgctttattcatttagtggaaatatctttaaggttcatataacatagtaccattgtttcacactgatggaagcttacttgacattaaatttcattcctctttgagacaaatatcaagaagacttttaatatagaaactcttttaagaaactcattactgaaaattgaaatgggctcttttagcacagccaaaaagaatgaaagaaaaaagttacagttttattagtttgtcttatgtttactatgatattaattattccagccatctcattttaattaaacttttggcaaatgcactagatatatttgaggtaatggagagaattctaataatcagagtgaattattatctctgctattgaagttattcctgtactattacaaattttccaagaaaaaataaatggatgcctatttgataccatattaagcaatcaacaatcttgttatgcttcttacttcacaaagtaccctagttcatagatgacaatgaaaatgttaatgatttatttcaattggattgctgtgaaatgctgttacatgatttgcatagtagagcacttcccttcatcccaattggttaatacaactagaactacaattgctctcagaatcttcagctgttcagggaaacattttccacattacaaagctctttgaatgttttgtgtatttgcgtatgttttgtatatttgcaagcagttttaaaatgtactcatcaagcaagaagaatttgggagattttggagatttgtattgacacttccatggtattccaaagtcttgtgtttaattagagtgggatttttagaactttaattgtggtacaatggttagacatttaaaaggcagttttattttttttaaaacgactttttttgtttttactacttctccccactttcccccaattttttagctttttgtttctcttgttgattgtctagagagggataatctgattgttggaaaacatcttgtctctccatctgtcttcgaagtccccacacctctcctcaaatacccaaagaataaagtctaaattttttagtctggtattcaggttactaccaacttgtgactcaacctgaatacacattgccttataacatatcttcctttctagccatgctggaatatttatggcttaatgttgggttggaaaacatgggtggagtcaaataggcctagagtcaaaaattgtttctgatgtatagtgactgtgttacctcaggaaattcattaacttccatggaccccaatttccttgattagaaaattgagattaacaggctgggcctggtggctcacgcctgtaatcccagcactttgggaggctgaggggggtggatcatgaggtcaggagatcgagaccatcctggctaacacagcgaaactccgtctctactaaaaatacaaaaaattagccgggcatagtggcaggtgcctgtagtcccagctactcaggagggtgaggcaggagaatggcataaacctgggaggcggagcttgcggtgagccgagatcacaccactgcactccagcctgggtgacagagtgagactccatctcaaaaaaaaaaaaaaaaaaaggaaaattaagattaacaatccctgtcatcaccctgtccttacctgtagaaatacaactcattcttctaggctaaccgtaggcctcttattccatgaaatcattctactcttccttaagtttaaagtaaactttccctcttctcttgactatgtgaactgtttctatgccttcataatggaacttcattcagcctgtgcttaaagttatttgcgtatatgtcaaacactcccaccagatgctaaggaccataaatcattaatttctctttcactccgcagagcctaacacaatgttctactttttattggtacgcaataatatttaattcatttaatgtttcttgtggaaattacctttgatcagtggcatatatactccaaagccctggctctttaatgataccaagagagatgatagaagtacttaccatccagtgtctgcaatatatttgttcaaaatgcatttgttcctaaaatatatttttctagctgtgtagattctgaggctgggtttctcttttgagaataccgatcttgcatttgaccaaagaatttttaattttcttttctggattatgcccaattcaaagttaatggtaccaggctcacatggcaatatatgctacctaatggttgctttctaatttctgaatatgctgctgaagagaaatacaattggagaataagatagacttcattcttgtgtaactaaataaaccctttcaaaagattttaaatggtatttctcaaacttatctgattcttagaacaatcttgggagcaccaattgaataagtagattctaggctccaccacagacctcctaaataatcagaatcttccactgcctcggttatcatcaaaatacccctgggtatttactacattttccaactgagacctctcacaaaatcctccccctggatttttgttacatcttaaacccagcatatccaagttgatttctcctcatggtctccatctctctgcttgctctttctcctgtattccctctctcatggatttgcaccacccagccctgccagccagtatactgggcagcagtcttcaccttaaaccttgctcacccctgactgctgtcaccacacaacccctcgactgcacttctctagtgaaggccattaatattgctcacccagatcgcttcaggagcctcctcatgccatgcaaaaaatttgcatttgttcattcaaaatatgtattttgatgacctactaggttccttcactcttatctatacagtgcatttccttgcttcttgatctcaaggatatcagagtcctcggggaaaatatccatataaatgaattctcacaaggtggggaggtgcacaaggtgccaggtacacagagaagcagctcctagtggttccctatgagatgtggacatgtcatccctctgcatcctcacgaagatgttgcaggaccagatatagacatgtgtttagtctgaaacaggtattacttgcctggttttgcacactcaggtttcaaaatcttgactctgttaatcagttatgtacctaaaggtatgtttgttcactagggatttataaacatgaacaaagacttgttgagaaaaattaaactcaatttctataatgagaactaggtatatttttatgcttgcctatatatgacaaaatatgaaaggtataaaaagttctaatataaatgtccagtccttgccaatcaaacaattggtagcctttggccagcgtggcttaggaaacattctgtccttgtcataactgattctgacttaaatgatcatctcctactcgtgaaagtctgatggtaatccttaaccaatgctttaagaaaagatcctctccccttgttatttcagttctcttccttgtctcccagcctggtcctgctccacagtgtctgtgctggaaagcttgctagttggttcagtacatacttcatgagccctgagaatttttcctaatttggtgtcttttgttcagcagtgtaccagcagctccaagaatagtgcctgagacataataattgctcagttaaaaaattgttgattaccattattaaagaaaaaaacagaaaacaacatgttctggaaaggatgtggagaaactggaacccttaaatactgttggtgggaatattaaatggtgcatctgctatgaaaagtagtgtagaggttcctcaaataattaataatagaattattagatgatgtagcaatcccacttcttgaaatatatccaaaagaattggaaacaagatgcattgcagcattattcacggtagctacgaggtgcaaacaacctaagtgtctatggacagataagtagataagcaaaatgtgatatatttacacaatggcatatcactcggccttaaaaagaaggaagtcctgtcatacaatatgctctggatgaaacttgaggagattatggtaaatgaaataagccactcacaaaaagacaaatactgcatgattgcacttacgtgagtttatctatagtagttgaatgcacagaaacagaaattagaattacggttaccaaggtctgggtggaagggggaaatggagagttgctgttcaatgggtttagagcttcagttttccaagacgaaaaagttctacaactctgttgcacaaccacgtgtatgtagataacacaatggtacacttaaaatggttaagatgcccaattttacgttgtgctttttactgtaataaaaaaaagatacagagaggatgtaataaaatgctataaactaaactagaaaaaaagattaagaacagtgttagtttaaaacaaaaaaaaattgctgattaataatcacatagagatctatgcatgaagtatgcattttttaaacaagggtgagctcatactatttgagttgttgtggaatttacttttctcacttcacaatatggtgcaaacatctttccttgcagttcagtggaacgtgacctcattctttcaaaaggcagtatgcaatcccactgaatgaaactacagcttacaagacccatctttttattgatggacatttctgtggtttttgctattacaaacaaggttacttgctattaattgcctcagtctgccaagtacagtctttaagtactgagtcattatcacttgattcacacctaaggctttgcttgccttcaaatatgtcctgcttaattctagtcccttgcttcacatacctgcaaaaatgatggtgtgacactccagctctgtttctctaatcagagtcctttgcacccacgttccctctggcaaaggtgttctttacaggctgtgatttcagacatgattttaaaaccgctgaaaagagcgacttttaggtccaaggtctataggaacccttattatgtaggaccttgacgcttcctttgtaagaccattagctatcacagagaagtagcacaaaggattactgtctaatacatttgtgacctgtattgtgtagattgcaattgcgtaattaaagttctgcttttgagagcttccaaattctcatgagccatattcctttttagaagcttaggccttagaatcctgaaatatgttttttcttcacacttcaagtctaccttgctaaaacagcatagctatctgactatgccaaacttattcgtcattatctagcataacatttacagtgacattttaaactaattagaatatgtgttttttttaaatactaactaaaaatatagaatataaaatgtttatcttttattaatagctataattccttgtaactaacctctatctttacctaagtaaatcgacctaaaatagtttctttattagactgagccccatgagggcaggaatcatatgtatctttttcactgccctagtcctggcctttggcagagtgccacggagtagaggcatcttataaagctgtcgaatgaattaatatttaccgatgatagggacaataccaaaattgtaatagtgttgatgtgagaagcatattcatatgcaatcatacaacatacacaaatgcacactgtgagcacatttgatgattatgtaatataggtgggatgatttcaaagacagcagagaggaatcttcctcttggcctgctgaaggcttaaagcacacacttagagacctagtccttttgcttaagatttcatcagcctggtaatctgtagatttcctaatgaaagacagcacatagacttgtcttgtttgtgctctgcatgtctcagtatgaaaggatatgtttttactgtggtcaggatttgttaataaccacatgggcataattaagagagaagcatgtggctgggcgtggtggctcacccctgtaatcccagcaatttgggaggtcgaggtgggcaaatcacctgagcctgggagttcaagaccagcctaggaaacatgatgaaaccctgtctctaccaaaaaaaaaaaaaaaagaaaaagaaaaaagaaaaaaaaaattagccaggcgtggtagtgtgtgcctgtagtcccagctacttgggaggctggggcatgagaatcgcttgaacgtgggaggcagggtttgcagtgaaccacaattgtgacactgcacttcagcctgggtgacagagtgagaccacgtctaaaacaaaaaagagagagagggagaagcatgagagctgggcacccattagacatggtctagcatcttcttgagaagtgaaggggacctgagaagcttatggaaatattttcctaatttagtctttcatattggcccatctttgtgagaatttatatgtgaacatatgtcaaaatggtggcaatcatgtcaaaaataatagaaacatcttagcaggttgattatttttgtagacttacacgtagtaccttgaagacaatagaacgttatttaaaaaaaacatttggctcagtgttttgagcttatatattctgtcaataatgggtggtagagaaatcaattaactataggtctcttatacacactctatacatgttgtccttcacattaagagatgatgctatagaaataagttttcataatgtatgcacatgaagatatatgtataaatacaaattaaatattctatgcatgcatagaaataaatacttgatttcctgttaacaataataacattagtaataataataatagctataatttataagaatttgccaggcactttaattcccataactagcccatgaaataggtattgttatctcacaaatgtggaaacttagatttataagtattaaacagtttaattattcaaaatcaagacagctggttaagcagaaagattgtataaatcaaagcaaggtgtgaatgacaaaaattcacggttttattcactatattatctgcctctactttttgtagaaaggcttataatgtagaatttaatctagctgtatgaaaacaaaattttgttacttttacttgttcaatgtcctgttcttagtgccaatatttaaaattcataagatctgtgttctggtttttctctggttttggagagataactgtttgatatttcatttgattttcttactttttattttaaaataactttatttttaaatggtcaaaatgtgattctattttctttcctggaaatgctcagttttaataagtgaaatggattatagaactcagcgaatcacttaggaaaactgcttgacagttttgagcaaaccttgcgtaacttttatgaaacacctccagtcagtttgtcaggtagaatttcccaagcacagtcttttttagattccgttgattccatttttaggagagcataacagtaataaggcattatcccgcaatgtgaaagctcttctctcttttcctttttaattgaaggatcaagtattcacacagggagatatctgccacattcaatcagcatctggaccttgaggggagccctcagttcatattcctattgccatgctgcactggaaaagacaaacaaatatgtttggagcatctatattcactacacatgttatttttatgacacactaaagcattgttgtttaattcttacagtaaacacaattcttcagcgtaaatagagataccttgtattaaatttacattgtattgtacttgcattgaatttccttggttatatatgacaacctattgagcaccttaggaaatacaatttgacataacatgatgaagaggcacaaagatatatatcccagtggatatgctttatggacaattatcatccagcttccctgtgaaaattaaacaccttaaaaaccctatcattatggaaacagaaaggtgataaacttgaaactccttctgttgtacagccaatgggaattaagtatccattttgtggattatccattgaagaactgaatgtctagaactagattaaattaaactgaattaagccagaacctgaccccctttgccacatggcatgttacagttttattttgcttcagctgtcttactgattattagtgccagagaataagcaagaaaaagcctgaaaaaatacaatatggtacaatataatagagtaagtgattttttatggtgaatatttctcttttgcttttctagattcactctttttcaactctgccccgtgccctgtaaggctgaaccttcctcacagtggcaatgggcttcctctctctctggcttcctgttggtttgtccatgggcagcaacggcaaaagatgagagggtgagaggagcatggagtctcagaactcattctccctggctctctttctgcatggctctggattccagggttgcattcctccagtaaaggctacatttcctatttgaagcctctttctttctccaggttcctgaatttgttctcaccctttcctctaaaaacataaagaagtttactggctcctagccaactagttaaaatggtctaggaatcttagctagtactagctgggaatgctttattgtcactggttgctttcccttaaccctgtccgcatctttgtaaataggagttccactaaaatcttttccatgccatttgagttgtcattggtttcctgttgaaaccctgactcattcctaaattttatttaatccacatttaacacggagaggtgttttttgtgtgtgtgtgtttgtttttttgatgggggggtagtgcgtgaagataaatttaaaatgactttcttcatgctaagagtggcaagaataaataagtaaatgaacaaaatttccattttcttaaactttgtttcaatacaatagacatcttaaaggccaataagaagagccaagctcaaagattctagtggcggcttgcttatctaataaacccatcatatttaatttttcaaataataatcaacttattgatatatctttgaaagcttttcacttattgttataaaatatttctttgttatcattagtgaaataatggcttatgacatcttcctcttgatgaagtagctctgagtgccaagtttagcttataggtcagtttcggccaggcgtggtggctcaagcctgtaattccagcactttgggaggctgaggcgtgtgtatcacctggggtcaggagttcatcaggagttcaagaccagcctggccaacatggcgaaaccccgtctctactaaaaatacaaaaattatctgggcatggtggcaggtgcctgtaatcccagctactctggaggctaaggcaggagaatcacttgaacctgggaggcggaggttccagtgagccgagagtgtgccattgcactccagcctgggcaacaagaacaaaactccatctcaataaataaataaataaaattaaataaaaatcaaggtcagtttctcagataagccctattacgtatcctacccagactaggttagcatccacctctcccttctctatcccatgttttccttctatccatctgatttttaaaaagtaaactttacatcctcataatacctctaatgtctgttctttcgcttagattgaaagttttgtgaaggaagtaaccatgactgttctgacaacttctgtattaccagcatgcaacacaatgtctggctcatagtagctaccccatagttactgatgagccagatgactaccagaaaccaaatctaaatccagcagacttacaaaaattattttacagtatttagtaaatacttgtttctttgcactttctggacttcattggaaaggaatgaattttaaatgaaaagatagcatacaaatataagaaactattggctaatgacagatagtgtgccacggaggaatacagacctgcctaagcttgtttttgagagatgttagtttagtttttacaagagaagtgcagcacatgacataggtcagaattggaggagatagtctaaggtgagcttcctatagcaagtaaaactttaactcatactagaagcaaggggacagttctgtgtgtgtcccttctatgtgcacagtgcttattactaaagcacattcatatatgctcacttgtttgattctcagatcaactgtcaggccaccagggcaaggaatattaccccattttgttggtcaagaaatgaaagcttagtgagttttgctatctaaccaagttttaaaggtacgtggtcatgacagaagggctgaagtggttggaggaagatccctgaaaaagaagacaattggcttggaagcttttgactttgttttgaaatagttcccagaacaggagacgcactcaagaactaatttgttgattgaatgattacttacgtaaatgtatatgcacaaaattgatacttcaaaataattggccatacaatttatcctgttctgcaacttgctttttttctctaattcacatggagtaaacatctttttatgtcaatagcatagtgctccctcatttttcctcaaagcttagtaaaatgccattgaatgaaaccacaacatttatagaggctatctggtaaatgattaatatccattccttgctacagctacatctcattaatgccagctaaccattaattataaaagatgttgacaataaggtttggtgcttggactagtagatagtcctcaaatggattctcatttatttggatttggtatactccttgaggtagtgttgcaaggagtgtttagccaatagttatatcctgaggagtcctcaaggcctgaggagaggaccctgaactagctgttaagcctcctcctctaaaacaaagtcaaacaacagggttgaaagtcaaagaatgaaagagaaaagaaagctgatgtgcctattttaatatcagacaagactttacagtgagtagtattattagttataaaaatgtagtttcataataataaacgagttactaaaattaacatttattttttatcaaaatatactataagggcccacaaagataaataataagagagatgatatttagaacacatgtaaccatcagaaaactgtatccagaatatataaaacatgcctacacatctataacaaactggagttaacatctgaaaagtcatttcacaaaagaagaaaaattaaatgtctgataaacataagaaaatgggccaacttctgtaataatccaaaagtaaaagataatacccaaacaagataccattttttacatctaatactggcaaaaatttcaaagtctgacaataaggtctttttgaggatatagaacaatgagaactcacatggactcacatgtacactagaattgacatactttcaaaaagagatgagcattgtctagtaaaattgaacatatatcaacaattcctctccaggacatttgtcctagaaaatttgtgtatgcgcttcaagacacatatacaaaaatgtgtataattacattgatgtcatagccaaagtataaaaacattctaaatatctatcaagagtagaataaataaataacatttgccctgtaggaatactacacagtaatgaaaatgagtgaagtatggctactctcaaaaacatgtatagaacacatgaatatcatgttacacaaagcaagatgaaaaaattatatatacaacataactctattaatataagttagaaaaccatgagaaacttaattatgttgttaagggatgcatttctcagtagaaaagcaaggacatggttcttcaaaagtcctcatatttatctgtgaggaagggaaagggatccaattatggacaggagatttctggggtgctggcaacattctattttttcaacgtgagtgatggttacatggccttttgcttttaaatttgtcattaaaatagaattgatattgtatatatttttatatgttatgttttattacgtgatttttaaaatgtagaaagaataggtatatggaagccgtaaagttgtatgcactgtagagtctgaatgcttcagtgccgacacatagctctaccacttcctagctgtataacactggccaagttaccaaacctctctaaaagcttttcttgtcatctatttctctcatctaaaatagaacccattccactatcaagagtttttcctgaagattaaatagtacttgattaaaacgctcaatccagtgattattgctttagcataaacttctttggactttaaagtgtttgtgtcttcttacctggcatgctcccctgcacaacagtattttttaatttaaatattttattttgagataattacagattcacaagaaattacaagagacagagattccatgtatctttaattcagtttctcccaatgtcaacatcttctaaaactataatacaatatcacaactaagattttaactctgatataatcaagacacagaacaattccatcacaagacatggtttcttcttatcctcacactgaaaaacaattccctttttaaccaggaacagaagggtaagttagtactttggaagtaggcttttatgagattaacgtcattgttcatgtttgataaaggaacactcttttctgaatagtgattttatcataccatattgcaatctaacacattccatccctaagtgtcacaagttttttttttaattaaaaagaaagtatatataactgctaaagatatttcttctgccacagactactgctgaaatgcagcattcccacatccctgcctcattcacgactacttcctatacattcaggaaaagacgtctttaataattatttttcctgtttgatatttttaaccatctcactgttactacctgcatgggcttccctactccagtctattttacatgtgattctagattattttttctgtatatgactttatcttgtcgctagtcagttcataaaaacactaatggtctcctgtgcatcataaaatcccaactccttgtagtgtcattcaaggccccaaattccctttgaagttttgttttctattagactttatcgagtgatatggtttggctctgtgtccccacccaaatctcaccttgaattgtgaaaatccccatgtgtcatgggagagaccccgtgggaagtaattgaactatggggggcatgtttttcccatgctgttctcctgatagtgaataagtctcatgagatctaatggttttataaaggggagttccctgcaaaagctgtcttacctgctgccatgtaaaacatccctttgctcctcctccaccttctgccatgattaggaggcctccctagccatgtggaactggggagtccattaaatctctttcctttataaattacccagtctcaggtatgtctttattattagcatgagaagggactaatacatccagctacaggaataacaacagattattgatctatttgggatacctttactgaaccttgcactttcttacttctaggcagtggcaaatgtcattttcctcaccagaagcatcttcctgagacataggtatttcacatattacctttcatgggagacttagcttcatcatatgacttattgaagtccccactaccgtatgtggaagacttgactgctctaaaaagcctgtaacacttctttagccagagtgattattccctgctagagggtcctgtacctactgtctactatttaattatgtcatttgtttggcataaagttgttgtggtgcttatgatccttgtttaacccttgaattgttatttaattatacctatgtttaactcttttcttacttccataaaggtagatattattcttattctgttcttacttcccaaaataccaagtatagtactttgcacttgattgactttcaatatatttatattaatctttttattaggcttatcttgattgctttgagaaccagagcatgttcaccagttcttaattcaagtgaaattcctaaaaattttagaagaggaaattagaccagaaacatataacaagagtagtgaccagagtggggtaagatggccagtttccacaactaaatttatatttgtatggccctgtaaaatgggttagcccctctaagaatccattccctcctctttacagcaatgacaacaacaattcttattttttggagttgtcagtgttaaagaaaataatgcataaaagcatgtaccctattgtctgtctcaaagtaagtgatcagaacattttaattttcttttttaagaaaggctctcactttgtcacccaggctggagtgcagtggtgcaatcatggcccactgcagcctcgacctcctgggcctgagtgattctgccacgtcagcctctcaaatagccaggaccacaggcacatgtcatcatgcccaactaactttttgcattttttgtagagacagggctttgccacattgctcaggctggtctcgaactcctagactcaagcgattcacttgccttggcttctcaaaatgctgggattataggcatgagccaccatgcttggcctgagcatattttaaattactttaaattattttgggctggtggcagtggctcatgcctgtaatctcaacactttgggagactgaggagggtggatcacaaggtcaggagttcgagactagcctggccaatacagtgaaatcccgtctctactgaaaacacaaaaattagttgggcgtgatggcgggcacctataatcccagctacttgggaggctgaggcaagggaatcgcttaattcgcctcctgggaggcggaggttgcagtgagccgagatcatgccactgtactccagcctaggctacagagatagactccatctccaaaaaaattaattaattaatttaaaaaattattttaagtattctataattttgaaaatacttacatggcatttcaaggactcaaaatcttactttccccagagctactcataaatcaaaactttgtttaaaataaatgaaaacagaggtacaacataccaaaatctctgggatgtagcaaagacagtgttaagaggaatgtttattgtgctaaatagctacctcaaaaagttagaaagatctcagtttaacaaactaacatctcacctagaagaacaaactaaactcgaagctagcaaagattttttttattactgattcaattttcgaacttgacattggtctgttaagggttttaatttcttcctgattcattctttggaagttgtttgtttctaagaattttctctgtattttctagtttgtgtacatagaggtgtttataatagtctctgaggatgtgttttgcttgtttgttgttgttgtttttggtaggaactgcctcccctaccccgccgaaaaaaaagaaaaaaaaaaaaactggaccaggtggattcacacccaaattccaccagatgtacaaggaagagttggtaatgattctactaaaactgttacaaaatatcaagaaggaaggactccttcttaacactttctatgaggccagcatctctctgatagcaaaacttgtcaaagacacaactaaaaaaggaaactacaggccaatattcctgataaacatagacacaaaagtcctcaacaaaatactagcaaaccaaattcaacagcacagcaaaaagttaattcaacacaatcaagtaggcttcattcctaggatgccaagtttggctaaacatatacaaatcaataaatgtattcataaatctccttgagttggaaatatatttaaaaacatgattcatcatataaatagaactaaaagcaaaaatcacacgatcatctcaatagatacagaaaaagctttcaataaaatccaatataccttcatgataaaagccctcaacaaagtaggcatcaaaagaacatacttcaaaataataagagctatctatgacaaacccacagccaacatcacacagagcaggtagaagctggaagcattctatctgagaacaggaacaagataagaatgcccactctcaccactcttactcaacatagttctggaagtccttgccagagcaatcaggcacaagaaagaaataaaagaaatcctactaggaaaagaagaagtaaaactatctttctttgctgatatgattttatgcctacaaaacccaaaagattccaccagaaagttcctggaactgacaaacaacatcagtaaagttttaggatactaaatcaatgtgtaaaaatgagtagcatttctatacaccaataatgttcaaactgagagccaaatcaagaatgcaatctcatttacaatagccacaaaacagtaaattcctaggcatacatccatccaagaaggtgaaagatgtctacaaggagaactagaaaacactggtaaaagaaatcgtgtatggcacaaatggaaaaatgttccatgctcatgaagtggaagaatcaataatcactaaaatggccatagtgcccaaagcaatttacagattcaatgctatttctatcaaactaccaatatcatttttcacagaattaggaaaaagctattctaaaattcatatggaacccaaaaagagcccaaaaagagccaaagcaattctacacaaaaagaacaaagctggaggcatcacattactcaacttcaaactatactataaggctacagtaaccaaaacaacatgatactggtacaaaaacagacacatagaccaatggaacagaaaagagaatctagaaatacagctgtgcacctacagctatctgatcttttacaaagtcaacaaaaataatcaatggagaaaggactgcctattttaaaaatggtgctggggtagcttgctagccttatgcagcaaaccagacccctacttttcatcatatacaaaaactagctcaagatggattaaagatttaaatataagatctcatattataagaatcctagaggaaaacttaggaaacaccattctggatgttgtccttgggaaagaacttatgaccaagtcctcaaaagcaattgcaacaaaaattgacaagataaacctaattaaactaaagagcttcagcacagcaaaataaactatcaacagagtaaacagacaaattacagagtgggagaaaatattcacaaaccatccatttgacaaaggtcaaatatccagaatctataagaaacttaaatcaacaagtaaaaaacaaataacctcattaaaaagtgggtaaaagacatgaacagacacttctcaaaagaaggcagacaaacagctaacaaacatgctcaacatcactaatcatcagagaattgcatatcaaaaccacaacgagtaccatctcacaccagtcagaatgactgctattaaaaagtcaaaaaacaacagatgctggcgaggctgcaaagaaaagggttgaatgcttatatactgttggtgggaatgtaaattagttcggccactgtggaaagcagttgaaggtttttcaaagaacttaaaacagaaccaccatttgacccagcaacccattactgggtatgtacccaaaggaaaacaaatcattctaccaaaagaaacatgcactcgtgtgttcatcacagtactagtcacaagagcaaagacatggaatcagcctaggtgcccatcaacagtgggttgaatgaaaaaatatgatacatatacactacgaaatactatacaaccacagaaaaaaccctgaaatcatgtcttttgcagcaacatctatgaagctggaggcttttgtactaagcaaattaatacaagaacaaaaaaacaaatattgcatattctcatttataagtgggagctaaacattgggtattcatggacataaagatgacaatagaccctgaggattaatggcagggaatggggagtaaggactgaaaatctaactgttgggtactatgctcactatctgggtgatgggatcattcacatcccaaacctcagcatcacacaatatacccatgtcagaaacctgcacatgaacccccgaatctaaaataaaagttggaaaaaacagctattgatacatgtcctgtgttctagttaaagaaaaaagcatcttcttaggcttcagtttaaaatgtccactacattatatttgttagtttttgttactctgtttaggaatctgaggtcaatgaagttaaaattgtcatgttaataggtgttttagacttaccgcttattaaaagtatgttttaaagctgaatcatacagtgttttatattatattgattttgtttatattgaaatcagcttaatatgatgtgtgtgtgtgtatcaatataatactagtcctacagtgtggttccacaattcatccttcagcccttcctccatatgctgtcaaatactgtttacctacaggatgccgggtaactctgtgtttgtgtgtgtgtgtgtgtgtgtgtgtgtgtgatctcacctatgttaaagttagacttcattctcatccacctctcaattagatacatcctggatactaaaaagtttttgagcagttgaattaactgtcacaaatatcacttaatttcattctcagcttatttgccatgtattcatcttagtctaagcccttctttcaataactgtctgctcttcctatatccatagttccagatgtcaaggttatctagcttctcaacatagattgctaagggttgacttactagagtcagatagacaaaaaaaaaaaaaaaaaagaagaagaagaagaagtaaatttggagaaactgtcactgagagaggatgtagaagaactcaaacaatgacacaagaattggtaaggtgcagtcactgagtgatgtttagggtaaaagctgggtaagaaccctgtatctcatcaatcactgaagcattatagaattagagaatgtagtctttggtgtccataatcaaagtttcagtcttcacaaaatgattcaattatattcattatattctgtgtgagaagacaggtaagtgtgtagaacttactagaaggatttccttcaaaagtggttaagatttttagagttcatacttaaggggatgagatttagtttcaatgaaaattaacttctataaaatatctcatttcccaatatgtcagataaatgagatattatgcacataatcctaacataaaagacattctctgttccccaattatgtaagaaaagggaactattgatttaggtactttgtatctcagttaaaaagcaggtcaaataggtagcatttcaagggtcttatggtttctttaagagattctgtaacacactatttgtacataagatttttttaggatcaactgactgcttcacagagagcctgacatgtaagaattttttggtcattgttattacctgatcatatcttttttccctttaaattttctatgtattataggtaggtggtgttttcactatgtgtctttcacttcttagctttaactcatttgtgtctttgtgtgtcaagtactacatagaattaaatcaaataccttccataggtattcataaagttaccatagatggtcacaccagaaataaagaaaaacagatactggcagccacatctttttgtgtgtttagagctataagtggtacctgagagtaaaataaaagatctttcccaaaaatttggaaataagggaaatggacttatcagaatggtaaactatacaaggttgtcttcttaaaggaaaatgaatcacagcagtggctttttaaaagtattaactcatttaacaaaaaatgctttaatcctaaatgaatgtattgtcctagatctgattggtataagagaaaacatttcagatattcaaaacagagggtattttatacaagtaggttgttctcaaggtgttgtaaagaagggctggaagaacaaaagggaaaggtggcaggtactggatggaagaaaaggatgattgacaggagctggtgcttactgctacacttgccgatttgacatttgaaccattatgggacgctgccccaaccagagctgaaatgccaacaacattccactaccgaagaggcagaaaatgcagaagagatgcttcttctgtctggaatgcttgaggctgcaggtgctttgtcccctgctgacacagcagctgtcaacaaagccctcagctcttggagctagaaactggacgttttctttcttcctgcttctgtcctcctcacagtgcctcccactggcaaaacccaatagaaggccaacaagcaagagagttggaaatgtagtttgtagtttgtaggttcagccgtacagaacaggctatagaagcgtggatgtgtagctggggcggacgtcagatgaatcaccttcttagctactcggcattcacacacacccttgtacttttcaccacctttcattaccaatagcaatcactctatgcttccaatgaacatgatactactatgctttgtacaaatgacggtgctctcacctccctcatcacattcttatctgggtgatgttaattccccttttagttcaggcacaacccatctggatattcttcaacataaaaaaactaaactataaattaatacccactaaccctatttacatgaatcaatggggaaaggaggacggaaaattggctacaatatacaaatctctgtgtcataagcagaaataaaatatgatagcatttataattcttgtttatataattagttgtgagaccatagctgatatttacaacttcttctctttgccctcagctggtagttcatttgtttgtagttcttttatttttattttttgtagagatagggtctctctatgttgcccaggctggtcttgaactttggggctcaagtggtccttctgctttggcctcccaaagtgttgggattacaggtatgagtcaccacacccggcttatttggaattttttacttaggccactggatcttcattactaagggggtctatgtccttcctgttctatcttgattgggttgctgcagattttcaatgcttatatgattggacctggtcatataaagagatgcccttttgaatgtcctgactgacaatgtgcagtaggaagccagtttctcctccaatatgataccttttctctttgcctgttataggaatgctatgaagagagggttaaaaagaagccaatgtgtaccaggtgcttagaacagtgcctgatacattatgagtcatatagaatgcattaacaaataaggtcgatttacttctggggcatatctattaagaatatcttcttttagaaagcaatacaaattataagtatgcttcacttattaatttttgatctggaacacacatgacaacagttaacaggatgcaatagaaagattctcatgctggaactgttgggttctatttctgtctctgtattaattaggtttacagtttgatattcaagggtaacatctattttatcctttggtaagagacagagtttagacaaggagaaataccagagtctgtgatttaatgattccatgaaactagaaatcacatcaagagtgcttgctttcttaagaccttctttgctattgtctagtagtcatactgaaaggcaattattatcttcccaggtgttatcacgagttatggattatatctagatggtatattaatccacaattcctcagaactcagctatcgtgcttacggatttgctccttggagtttacattccttcagagtccaagcatgcacggccaaaggttgtgctctgggcccactggtgagtatctaaatttacattctaggaatgtgttaaatgtcagatgacactgaatattaaggaagaagtaagtggcggtgactcaccctctgcacagctagcctttcaagcaggatgggagatttttctttttataaaagttcatttaagagttactaagattttatattcgacataaatttcaagactgaacataggtccagtgaagggcagagtctacattttattgaaagaaagataagttggctagtgtagtaggcaaacatgaaatttttcctaatttagtgacatattgaaggcagatgtttttctttctaatcatgggctcaacatctaagtaagtttaagattaagaagtaaaaataattgaaagtccataagtgccacaatatggcaacactgctccccaaaaagtaatcaattaaaaggttgagtttacctcatctgttaggataaaatagtttcatgtgatacagcttcataagaatggtatttaaaattacatcaatatcagcttttgatattcatatttcagaaatctatatctgaaatgtatatctatatttcattagcagttaacagcttgacaagattatgttttctattcctaatataatttttcaaacccaattaatagcacttaattatcataaactagcaggacagtcttcagtttcaaaacatcacattacactttggtgcatttttcttgattaattagattttgcttctttagatggaaatgctcattagtcttagatattttttggcaatgtttgctaatgccctatcattttagtgcatgctgtcttcactgaagagtatattatataaatattaccttggaagacagctctatgttttaatttctgcttccttatttttgatcacacctctctttttgtttcagagattggttgctttccaagcagctaacaccatccatcggcggagctgagctgtagtctttattgccattaagcattttatagcccagacccctctgatggatacttacccttaaatgcaggaatggcaataggccagcttttcttatccattcaaaaaaaaaaaaagaaaaagaaacaaaagaacacgtcacatgagattgaaatttacactttttgaaaatgtaagctgcaaatggtagttctggctacaaaattggctcagcggtgtctcctgatgttctggcaactttaaataagggggacctgcattatcaacctgcatcctgcacagacagtagctacgttaaccttaagaaatcaaatgccacaaagctctgataggaaggggggaatagaattgggttgtaaaacctagtctgccatggcttcattcattccagactcaatcctgacttacagcacagagttattttctcccttggtacttttctttatgctgtactcagtatgcaaacgcttttccctagtcaatgatccatctctaatcactgggattgaagagcaatgtctttatttagaacaagtcaactatatgctaccaagaagttaaagcccatggtcttcaactggtttgtgaaatatttttgtgcccattaagtgattccatatctgagtattctaaatagccctggatggctagcacaatcatgaaggatattacagattcagcttctttttgttgatgattcttttaatgtgtccttattgacttaagaaatctatgaatcaatcttaaaaggcagagttttctatcattaaattatgatgtgatactcaacaaaattcagtcaaacgtggcaatggtgtacaacggtttcttaagatattcatctaaatagagcccgatgctatgacattttaaataaaaaatttcattgaaacagaaaatttatcatttctatttttaaatattttgctggcagaaatcagaataaattttgaaagagttcaatttttttgttcatctaatatttcttaatgataattcttgttctttagattatccacacatgcagggaaatactattcaatgttttctatgaggaatatgcttcacagtcccaaatatgatatggttcatcctccaaattgcaaattgttcatataataaaaaatatgaatttgatggagaatttttaaaaataaaaagacatacagaagttccatattcttaccacttgaatgtagtattagctcatttttttttctaatctgaccagtttgttagctattatttatggttcagaaggagttgccctgtacctatctggaaaaaacaaaaacaaaacaaaataaacagcagcaacaacagcaacaaaaaaaacccacaatgattctcctgtggtttttttcagttcttactcaaccaaataatgtatttgactcttatggaaatttcaatatagaaaacaattgacaaagcctttgaacctaatttttagatgctaatgtgcattgtcaagttaaattcaataaattggggttttataaattttgaaataacataaaaattaacagaatgcagcaggaactttttaaatgctttccttgctttcaattgtattagagggaaacccttcacattttgtaatattctttaataaaatacaataatgttttccataagaaaatcactttgctttcttactccccacttagccaatgttacataacactagtggagtctaagattgagaattttatgactgtgtcttgtattgtaacattcattggatcgattctccagggactcttaaggatgatatgcgagactataggtcattgctatgtgatatggctaaaaagttgtcttggttccttagtgatgtcatacttatacagataaatacacctggataaatacacatgtacaaacacattcaccctttcacattttttttttttgcaaagaagcaaataagtgtgttatttaagacatctaaatcttaatggcaatatataatatagtcaagcaaacgctataggggaagtctgccttcaacctgcttaaaccccttaaatccctatacccccttaggagatatacttattctacaaagcctcagatttctcaactattacaaagagaaataatgtctactttaagagagttggtgtaaaaaattaaatataacttacacaaatttctggcgcattgcaagagttttattaagaataacagtttatggccaggcatggtggctcacacctgtaatcccagcatgttgggaggtcaaagtgggtggatcacaaggtcaggagttcgagaccagcctggccaatatgatgaaaccccatctctactaaaaatacaaaagttagctggatgtggtggcgggcgcctgcagtctcagctactccggaggctgaggcaggaaaatagcttgaacctgggaagtggggattccagtgacccgagattgtgccactgcactccagccttggagacagagtgagactccatttaaaaacaaacaaaagaattacaatgtattaaagtgtttgtatgttttattgcacatttgctctcaaatattttttctgtgtcaagagaggttcccaggccaaagccaagccaacttttacctttcccaagtgccttttccacatattccttttacagcaaggtagataaacaaaaaagtaaaatgaaaaagaaagaccaggtcagagcaaaatagtacaattgccaaattcaatgtatagtaaaaactgaagtgtttatccaaatatttaaggaaatgttacaaaacatatttattttgaattaaccaaatatttgaggattataatataattatctggaattgcccttaattcttcaacttttcaagtctcattttatttggaatgctttaaaatcattctatgtacaataatatgaactatatagataggcataataaaacaaattacattgtcataaaatattaaaatgatgaattgatatttttctggcctagtttcatcatttttgtatgtagctattaaactaaaaacgaaagagcaagtgttatagttctaaagaatcccatagcttttctctgatgaaaataaaacatgttgtgacctcatagttattaaaaattaacactttctttttcacatttattttcataattgataaggtataatcaccctaacaaataaaggttttctaattgataatatttctgcctaaggatttcatgtttgatcacctccttgggaggcaagagcttgtaccttaagaataaagttgaaattatcacatatttagtaaattgtgaaaggtcaaatatctatgagtgatgctgatgagtttgtagtgattagttaactgaatttaagctaatgattaaaagatattaaaaatttctgaactcttttctactttcttgccaactacatcttcctctgaccacttattttacttatttatctattgaaatcttcctgaccccggtacagctagggattgcattttatttcagagtctttctcttcaaataattcatcttttgctcttttctgcatagcttcattaacacaatcaatatttttttgtgattgtgccttagggatagagtccctaggatgcatgtatttcttaatgttagcatgatgccatttttacataactgatagcaacatagctcataaaaattttgcgtgtgtgtgcgtgcatgcctgtacacacatgtatgcatgcgtgtgtgtgtgtgtgtgtgtgtgtgtgtgtgtgtgtgtgacagagaagagagagagtcaagatatgtggtgtagctttttgacagaggccagaagtctaccacctaagtcaaggacttataaaaacagactgcgtgcatttcttctcttttgcaatcacataaaaattattttaaagcagtcctagaattggtctatggatatgtacagccataggcacagtcacagtgtgagcagatccacatattctggaaatcacaaatagctgccttggtcaagagctcaaattctaagctttaacagcagggggaagaaaacatgaggtgtgctttgatcctgctgacaaaatgaggtattcatacaagatgctactgtcaaaatagtttacttcacagcaaaaagagattctttgaagaaatatgctcaaagcgaagcatgtacttattttatttgcaaacaaaaataaatctttttatactcacaggtggaaaatcgaactctagaagctcctcctgaaggaacagtaaatgtgtttgtcaaaacacagggatcccggaaagcccacgtgaggtgggaagcaccttttcgccctaatggactcttaacacactcagtccttttcactgggatattctatgtagacccaggtaatttgtttttattttctaaactttaaataacattagaaaacaactcatttttatttaaaatctttcttttggctaaaatctttcttttagccacagatgttggtttctttattttcctgaaaataacctatacggataagctactgcccgacggttctcagaatgtggttcccagagcagcagcaacagccacatctgatgaacgcttagaaatgtacgttgtagagcttctgccccagcctagtgaatcagaaactctagaggctaaggtctaacagtctgtgtttaagcaaaccctttaggtgacacatgctgaagaactagtatatactcttcttcccttgctaaaaagtggttcaaacctaaaacatcgtgtatgcaaagagttgaactataattttgcagtccatcttaaacaagccatttttgtgactgttttagatttctgaactatcttagtaattctgctgtgtgttctgataaatttactgaatgtggattaggctacatggggttccttgaaagtattttcaaaaactatctgattcaataagttaggtgctatggtagcatgatgtttattttaagcaaactctaccataaaaagagcaggtatatattttaatagaaactttggatctgtattaagtgctgttgtttatcatcttccaggagtggccttactatttttgtaggaggaagtttgaacctttatttttaaatgagtagcaaatatgcaatatcgtggattcagtcagacatgttattagcatgttagtctgttgcttaggcttgaaaacgtttctttgtttctgaattttctatgagtctttgtaatacttaataacatcctccaagtgtaaaaacaggtgaagaaagaaaaaaacaggcttttctaaatttgaaaagggtggttatttgtgtactgcactggcaagcaaatgcgagtcaagtgcgtgtcagagtctaagctgatcccctcaaagattggtgtgtcccttttttatgcaatcagggctttcatgtattctgctgtaaagcacttgtaagattatgaggtgaaggagtgatgatcgatttgaaaaaagaagcaacatttaggccggacccatgacagcccagctatttccgccaaggcagctgggtgaataatgcaagagccatattccccctcgtgtttaatcttgcattgtttttgcagagaaaatttctgcttgccttctaagtcatgtcatcttcagttgtcatcccgtctctcaaaccatcaaaacggtattaaatgttgcaaagctgcgcggcaagagaactttcaaaagtcagaacccatttaccgaacagcccttgtagaaaatgtattctgttctcggcagaattttccttcagttctttccactgagaagtttactgatttctcccagtggaatctgctggaatttatcggttcatggttggcagtcacagattaaggtaaatgtcgatccgtaatgaccctctacatgttagtattgcagtaaagctgggcttttatgtcaaagatatcggagagggagctattacacatgacaggggtgatcaagggactccagaccaaggcaagcattattaaatattgactagttctgtgatttatgtagagctggaggaaaaaagtgactttttaaccattatatattcttcagcaacgaaaaccagccatttatctcctgctggtaataaagaacagagtgcctgcatattttagtggagggaaaacctggtcttataaatgagatgaactccttcgtgataacatttcagtttgttaattgccaaaagcaaaacagacaaattggaagcaattacgagatttgacttaaagaatttttgcggtacgggttcaactcaggggttggaaaggggtgaggttggaagcaaaaggagcatctgagatgggccccaggaaaattcgtgtcattggttcactggcactggaactctcatgtccactgttaactgaaaggattttgaatattgtcttgtcctgtcacccatcagcagctgggtgacatttacactgagggtagggaggtctgcatggctctacaagaacaaattaaacattaattcatcaaacttatttaagatatcatctgttcactagatttatacaaagcttattgaattgtctaatggctaattggttatttccttgacataatgaacaactgtatttcatcctttcctgtgatggctgctaaagagggggtggttagaatttataagatagggaaattcagctagttcaaagcaagtgtagtttcaacataaaagtgcctgcagctgggtcactattttgcaggagaaattgggctgtgtctgtaagacaccctcatgggaaccctattcttcatgtcaactcgtatcctgaactaaaaactttacaaaaacattaggtttcgtaacaacaagtgaagtggcacgtatcaaagtgtgatttttcttaaaaattgttcacttttgaccacgtattatgttctcatgaatcaaaatttaaaagatagaaaaaaaggaagtaaagtaccaagcctgttctgcagtctcagaggaaaagtagtgtgctcagcttcttatatccttctagaaatatttgtcttataggtgtgtgtgtgtgtgtgtatacataaacaaacacatatttcccccatttgtaaatacatatagttttcatctcacacatgcaacattttatactaatgataccaagtggtacacattattttgcaccatgctttttttccatcttaataatttcagagaaattatcacagcaattcctaacgagcttcctcattctttatatagcttggtaatattcaacgggttagagcataccatcattggtttaaccagttccttattaatggccatttaatttgtttctaatcttttattatttcaaataatgcctcaatgaataaacatatgggaatgtcctttcacactttgcaagtaaattaatacgataaattccttgaaatgaattgccaggtcaaggaaaaatgaatttgtaactttgtaagatactgtcaaatttcattccatagagaccatataatttatattctcagaaaaagtatgagggtgcctgtctccccacagtcttgtcatcagagtgttgtcagacttatctttgccaattcgatatgttaaaaatggtagctatttcacagtatcttgagtagttattaggaattagttggaacttatgaacatattttcttaagtttaaaaactgtgtttcttttttttgtgaatgcttcatttgtatcttttgcccacatttttacagaggtttaagaagttctttatatattaggaaaatctgttatattagtagaaatttttcccttcattattgctttttcctagcactctactgctttcttttataaaatatttatattcagttcatctgaaatttatactgatataatatgtcatgtatgggtcaaaccttattttcttcccagaaaattttcctttctctcaaaaccatttactgaataatccttattgttccccactggcttgggttgtcatctccaagagctcctaaatttccatctttattaataaatacgtgtggacatatctgtacctttatttacattatcaaggtatcttaatgattaaaactgtagaatatattttattgccttgtagatctagtcctcttcattatttttattttatataatttcctacttattatttcatatttatttttttcaaacaatatttatatatttctaattttaccccagaagtcctgatgctgtttttataaggatggaacagaatttacaggtgacttaggtagaattaatatctttatactgtcgggtttttctgatcaatgatatcattatactttctattttgtgtcttttgtgtctctcgcaagagctcaaagttttcttcatatagatcttgcatatttctgttgtgtattcattaatattttataattatacatgatttaagtaattatgataatatatacattttacatattaacattaaaattaaataactgaaaagagctactttcaataattatatgtagacttcactcgcagatacctgtcttctgaaagccacgattttaaatgtttatatctattagatgatcgttcatctaacttttacaaatatttgaagtttttttgctgctaagattattgtcattttctctaaaatgcaggcatcttaccaggggaaaatgataatctaattaattagactctcaactagtttgtggtgtgtaaaatggcaacaaaggttggacctgaagaatctctgtcctgacagaatttacaaataaaaaagctaaggcagacaaacttagccaagttattctcaagtgcatgaggcaggaaagaaactagatggtgtgacaagtggaacagaaataattaagggaagattttggtaatactgggtctttctctttaattatggatgagaataaactgaatatggaaaaactaaagagaatgacggagagagcacaaacacatgtgaatggcaaaaattaacagatcaaccaacctacacttggttatattagaatgtatttttgccatttgctaacatccaccataaaagtaaggattagcacttttctatgggattctacctgatttgaaacatctattcaattatgaggaacatatgatcaacaaattagtttttctagggtgtgcaagtgccatttactgacctggaataagtgctttgctcaatgactctcaagggtgcaccattcaccttgcacaggtgaatagtcaactcccagtgatcactttacaacatcttcagtattttttcacacatatgaattaactatcaatttaaattatagataacaggtttataatcattccttgtgaaacatattgaatatataatttttaaaaaataaaacaaatgtgtaagtttgggaatacaaataaaactttacagcatagtagtagcaacctggcttatgtaaaactatttataaaattataaattctattccatttaactggtagatgaaagtattgtgccatgataatttagggttacatcattattttacagagcttcaaaagtattctcagctacaaatataaaacaacctaattgtcaagaagaaaaataaaaactatgaaaagataaagaaaatattctgagatcctatagaataatttttacaaatggcagcttctttactactagacttcccttggattcttcacactgatcctgtacttagtagacaatgccatgtcttagtacacatatcctgcttttttcttaagtggttattgtggagtcctctgcgaattgtttaattcttcattatccttccttttgaatgaattgggacgtgatcttcattgcttgatatcctgacagattgctttgtgtcagagtttctaaggcaaggcaccagcgtgtgctaattgctgagtcctttgtgcactgttaactctcacctgctctgaaaaactggattgcagcttagttttcatcttcaaatgtctctttctcctaatcccctattttgtgctgtgccacagaataaagatatttatttgaaaaagagagatatggattactgtgggggaaaaaagagggtaaatgaaaatgatccttaagcattagcaaagggaaatggcattttagaaaaacaaaagaaaagcaaagcagaatgatcagtttttaatgttgaaactgaatcatttcatggatctcagataactctttctgaatgtggagaggtacaacaaacaggttttaggtgacttttcccagagtaaatatgtctaatccaaaataagtcctcaaaagtaagggtggaaggtaaggaccgggaaagaaaggaaatggaagatagaaagaacaatttttaaattgttaaatgctcatgaaatgagcataatcagatgctttttatttgcttataagacctgatggtcctgaaaaaaagaaacccaattagtatttaagaatgtttttaaaaaggcaaatgaaaatttgggaaatatatctgttatctctaggtggttatattatgaatggtttgtcttcccatttttccttttatatgtactcaacttaaaaaaaattctataatatatacatattatttttgcaaaacattataaaaaatagctcacaagagcagatgattcaagagcagagtaatttggagtaagcatggtgcttctggctccaaggaggagatccgggtggtgagtcagaagtcctaaggtggaagcttacagaaagaagggcatcttcacatatttccaatgattattcaggaaaagtcttttggtgacttgtgggatgttaaatttaactttcttcttatgttttggctgcatatgtttttccaacagttgctaggggtaatcaaacaaaaacaccaaggattctgcaaaacagaaaagaaaactaaataggagtggtcagagaaataaaagagcctctttatacctgagacataatggtagtgttaggggaggactgaggcatgggagatttggtttttttgaggttacattgtggggatcaggaggggcataaagtttttactgcagtggtaacatctggaaggagtggggtgccttaaagaccgattaggatatttccaggtagaaaagatagagtataaatgtgatggctccccatcccccattctctgagcctaaactttttcttctgttataattggagtccatatctcatttcaatattggtatcaagtgtttgctctttgggataaatccccatctaaaaacaaaagaaattaaaggggaacggaaactgcagaaatgcagaaagtatttcattgctggtttaaactagatgaaagtgtatttttaactacagttccgaaaaatcctagcacccagaataggcttaccttctcctggaattgccagttaccagaaagagtgctttagaatgtcagtatattcaaatgctctaaatctctaaaaaatcttgaaaaaccaaagaaatgcagttgatttttcaaggttacccagagaaatccagtgtccttttcacacactctggttctctgggtgcttttctccccagaatatactgtgttttataaaaattacaagatggaaaaaaaatatacagaagcgtttattttcttgagaaggtaaggaaaataattatatgtgggaacctcttagacttccaaagagtctgtaggaaggctaatgctgttaggaaagggacagctttgttttatagtccctggtatctgttttttagtgtggagggaaatctgcggtttcagagctgtgcttgcaacccatgcagtatatctgacacgctgccctctgggaaaacccgccagtgggggaattgttccagtgatgcagtacagcttgtaacttggaatcccgtcggagaactttgtagttgcttgtcagtcagtgggaagataaaagaggcagcttcttttcaagcaatctgaattcattttcccgtaatgagttagggggtcaggcagcaggagtgagttcacctgagatcttataaagtatatttcctggtggaagaaagagaggaggagaaaagggaacataacgtccaccacgcagctgtagaacggcgtaatgtggcttgtcgttggtctatttctttttatgcccacatattctgatttcagagcatatatttttagaaagaaaggtcaaagaaagtacagctttatctcatttaaaaatataaaacccaatctgtgaaaattgaaacccagttaaagtctaaagcagcaagtgatagtgtttcatacacaaatactcatcaagcaacaacatgttaaagatattgtactatgtcttctgacattacatcattattaaccacacaatttattttagagacttagaagaaattaaatgagtgtcatgataaggagttcttttagttacagacaacagccccagacctctcttcctgaccatttcagatgttgtttctaaatcagcacaaaagatattaggaataaaaactgtgggagaatgttcttatggtcaaagcaagtattaatataaaaaacattgggaatgtaggggaaatagagaaaattactctgtttctatttgtttggaagcaaatgtctcttatgcaaaaaagaaagtatagttattatatctttctgtaagtttccaacacatttctggatgtataaatacatacaaatctaaacacttgggaaatcaaaaggcattttttctggactacaaattatggccatattgttaatgaaaatataaacgggcaataataagatatctgtcatttcaaatattgggctatagaatgtatatgcactgaatgtattgacacttctgattgtatatcatgtcatggccaataaagctatagaaatgtttaattaggacatattcttccacaagaatggagttaagcattaatttatcaaacttgtttaagacctcatctgttctcaacactcacacagcagcttattgaatttgtctgatatctaattggctattttcttgacataatgaacaagtgcatactctatgctgttgtgtctgttgaggcggcgatgtaatgatgaaatggaaattgtaaccatgggtcgtacactgattcaggatatgcagcccacagagccatgagagggcacaggatttcattgtcctcatggcttaactttatgtttcaaactctgcagagcatctctgtggaggaatctctccattctaactcctcatgaaaggagcctgttagaagcaaaatacaatcagcagatcacccagatgatgtacctttggctttggaaggctttgcataatttaaaaaataaaataaaattctcctatttagagaaatttttaaagcatttaaaaatactcacaccattttcaaacccacaccacaagtgatttgggggatttctaatacatgcatgataaagttcaactggataagccagccgtggggcagatatataatgtttacctatagttgtgtaccactgatatgcctgtctagtgttggtttttgcatgctttgttgtggcaagagttcagtgcttgttgaataaatagtaatattagaatcagtgtttagattttggtagactgaacatatagccattttacctaggaggttctcagtaggaaagtgtcagctgtgaattgatgttagagggaaacagaagaatggattacacagagaaatagaaaaaaaatctagccatctggggccaatgtccttctctagcctctaagacacaccctacagcaaggaattcccttctctgattcctgaacttctcctgtgggaatctagggatcaacttccttggatggtgatgggtccttatcattatacagagttatgaggattacaaaccatatgtttggccccttagaaagtgataataggtgactcctaaatcatagttctatataccaagaacagcccacatcaaacatatttcccaaatttttgtgtgaaattcttcataatcaatgtgttactttactcaattattagtgttgcagaatctaaggattctagtgggctatttatgaaaaaaaaagtatatggcttttagagaatttggattctttatttataaatcgggttgcaaataaaatttatgtttttccttctagcaatatgcctttggggagaagcaaagggagttttacacccaagaagcagaaatcaaaaatcatagaattaaattaagaaatttatttgtttatttggacattcattcatttgttcatgtagaaagcatgtatctagcttgttttatggaacaagacagaaactaaatgatagctgctggagttgagtagagaaattttctctatccagagttgaatcatatgttgttttattgtgctaaatttgttagacatttaaatttatacgaatgatggtgcctgtttctgggatatttattccttcccattgtaaacctatttctccaaatcatcactatgctaacttaatcactatgctttcaacatctgaaacatttagaaagtacttaaatatctggcaagcatggtctgtgtgctgaaggggcttgtggtttaacaaggggagctagaaattacccaagtaatcatatagaaatataaaattacagactttaataattattaaagtaaaagtatatataactaagattttcataataagaagcttaatataaattggagggtcaagaaagtttctttgagctgatgacatttagggtaactgtaacatgactagacaccaactcagaaactagaaagaggattccaaagtgaatggcatttgtaaaggatgtgaggaaggtaaaattgtggtggatttgaggaaatgaaagaaggacattgtagctaggctagggagtgaagaaaagaatggcacagatgagactagaaagttagacaggagctacttcatgcagcagactgttttaaggactttggcataaagtaaaagtgtagttgcaataattacaaaaaattttcaaattttcaattgtttttttttattattattatacttcaagttttagggtacatgtgcacaatgtgcaggttagttacatatgtatacatgtgccatgttggtgtgctgcacccattagctcgtcatttaacactgggtatatctcctaatgctatccctcccccctccccccaccccacaacaggccccagtgtgtgatgttccccttcctgtgtccatgtgttctcattgttcaattcccacctatgagtgagaacatacggtgtttggttttttgtccttgcgatagtttgctgagaatgatggtttccagcttcatctatgtccctacaaagtacatgaactcatcattttttatggctgcatagtattccatggtgtatttgtgccacactttcttaatccagtctatcattgttggacatttgggttggttccaagtctttgctattgtgaatagtgccacaataaacatacgtgtgcatgtgtctttatagcagcatgatttataatcccttgggtatatacccagtaatgggatggctgggtcaaatggtatttctagttctagatccctgaggaatcgccacactgatttccacaatggttgaactagtttacagtcccaccaacagtgtaaaagtgttcctatttctccacatcctctccagcacctgttgtttcctgactttttaatgattgccatcctaactggtgtcagatggtatctcattgtggttttgatttgcatttctctcatggccagtgatgatgagcattttttcatgtgtcctttggctgcataaatgtcttcttttgagaagtgtctgttcatatcctttgcccactttttgatggggttgtttgtttttttcttgtaaatttgttggagttcattgtagattctggatattagccctttgtcagatgagtagattgcaaaaaatttctcccattctgtaggttgcctgttcactctgatggtagtttcttttgctgtgcagaagctctttagtttaattagatcccatttgtcaattatggcttttgttgccattgcttttggtgttttagacatgaagtccttgcccatgcctatgtcctgaatggtattgcctaggttttcttctagggtttttatggttttaggtctaacatttaagtctttaatccatcttgaattgatttttgtataaggtgtaaggaagggatccagtttcagcttctacatatggctagccagttttcccagcaccatttattaaatagggaatcctttccccatttcttgtttttgtcaggtttgccaaagatcagatagttgtagatatgcagcattatttctgagggctctgttccattctattggtctatgtctgttttggtaccagtaccatgctgttttggttactgtagccttgtagtctagtttgaagtcaggtagcgtgatgcctccagctttgttcttttggcttaggattgacttggcaatgcgggctctttttttggttccatatgaactttaaagtagttttttccaattctgtgaagaaagtcgttggtagcttgatggggatggcattgaatctataaattaccttgggcagtatggccattttcacaatattgattcttcctacccatgagcatgcaatgttcttccatttgtttgtatcctcttttatttcattgagcagtggtttgtagttctccttgaagaggtccttcacgtcccttgtaagttggattcctaggtattttattctctttgaagcaattgtgaatgggatttcactcatgatttggctctctgtttgtctgttattggtgtataagaatgcttgtgatttttgcaaagatactcctcgagaagagcaactccaagacacataattgtcagattcaccaaagttgaaatgaaggaaaaaatgttaagggcagccatagagaaaggtcgggttacccacaaagggaagcccatcagactaacagctgatctgtcggcagaaactctgcaagccagaacagagtgggggccaatattcaacattcttaaagaaaagaatttttaacccagaatttcatatccagccaaactaagcttcataagtgaaggagaaaaaaaatactttacagacaagcaaatgctgagagattttgtcaccaccacacctgccctaaaagagctcctgaaggaagcattcaacatggaaaggaacaaccagtaccagccactgcaaaaccatgccaaattgtaaagaccatcgaggctaggaagaaactgcatcaactaacgagcaaaataaccagctaacatcataatgacaggatcacattcacacatagcaatattaagcttaaatgtaaatgggctaaatgctccagttaaaagacacagactggcaaattggataaagattcagacccatcagtgtcctgtattcaggaaacccatctcacgtgcagagacacacataggctcaaaataaagggatggaggaagatctaccaagcaaatggaaaactaaaaaagtcaggggttgcaatcctagtctctgataaaacagactttaaaccaggccgggcgcggtggctcacgcctgtaatcccagcactttgggaggccgaggcgggtggatcatgaggtcaggagatcgagaccatcctggctaacaaggtgaaaccccgtctctactaaaaagacaaaaaattagccgggcgcggtggcgggcgcctgtagtcccagctactcgggaggctgaggcaggagaatggcgtgaacccgggaagcggagcttgcagtgagccgagattgcgccactgcagtccgcagtccagcctgggcgacagagcaagactccgtctcaaaaaataaaaaaaataaaaaataaaaaaaataaaccaacaaagatcaaaagagacaaagaaggccattacagaatggtaaatggatcaattcaacaagaagagctaactatcctacatatatatgcacccaatacaggagcacccagattaataaagcaagtccttagagacctacaaagagacttagactcccacacaataataatgggagactttaacaccccactgtcaacattagacagatcaacgagacagaaagttaacaaggatatccaggaattgaactcagctctgcaccaagcagacctaatagacatctacagaactctccactccaaatcaacagaatatacatcctcttcagcaccacaccacacctattccaaaattgaccacatagttggaagtaaagtactcctcagcaaatgtaaaagaatagaaattataacaaactgtctctcagaccacagtgcaatcaaactagaactcaggattaagaaactcactcaaaaccgctcaactacatggaaactgagcaacctgctcctgaatgactgctgggtacataacgaaatgaaggcagaaataaaaatgttctttgaaaccaatgagaacaaagacacaacataccagaatctctgggacacattcaaagcagtgtgtaaagggaaatttatagcactaaatgcccacaagagaaagcaggaaagatctaaaattgacaccctaacatcacaattaaaagaactagagaagcaagagcaaacacattcaaaagctagcagaaggcaagaaataactaagatcagagtagaaccggaagacatagagacacaaaaaacccttcaaaaaaatcaatgaatccaggagctggtgtcttgaaaagatcaacaaaattgatagatcactagcaagactaataaagaagaaaagagagaagaatcaaatagacgcaataaattttcaattgttacacagttgaatattagttacatttagtagctaaaggcttagattggagtgtcttttttcttcagagacagttttgttaaaatggtaccagttagaccaggtgcaggggctcatgcctgtacccagcagtttgggaggctgaggcgggtggatcacaaggtcaggagttcaagaccagcctgtccaagatggtgaaaccccatttctactaaaaatacaaaaaaaaatattagccggacatggtggtaggagcctgtaatcccagctactcgagaggctgaggcagagaattgattgaacccaggatttggagattgtagtgagccaagatcacgccattgcaccccagcctgggtgacagagcgagactctgtctcagaaaaaaaaaaaaaaaaaaggtagcaattataaatgtgttattggcttgcagtcattttttctatggagatatacatatgtgtattcatgtgtttgcatatataatgtattgagatcttactacaaacacatatcatattttacacatttaacattatatcatgaatgtttcttgtattacacacaaaaaactcataacaagtatttaatattcaataggtacttaatatactatagtatagatgtgccaacatgtatttatcaattccttattgttggatatttaggttttttattcttactatttgaaagaatatttattgttaacacatacttctacatttttccttaatatgtataacaacaaaggaattgctaaattaaaggttgagtatatttttgaagacacttgatatgcatggcaaaatgctttcaaaaaaattacatcatttcacatggcttctaatagtatacaaatgtgttcatctgtctgtagttatatgcatttgatagataaaaatggtaggttgctctaatttgcatttcttttattcctattgagaccaaacattttccatatgttcttttcctatttgtttgtctttctttttttgtctgctcacacactttgcccagaatattttagaggttttaaaatttgttttggtatttatggaagctaaaataatatagatagtaattcttagtcattacaattttaaatattttatctgatttatctttttggtctttttatgaggtttatgatgtagtacttcagatttttgataattaaatctttgctaatttatttttataaaaaatattttctccgtctacagttgaaacatatgttgctttattttgctaaatttatcagacttaaatttgtatacatgatgctgcctgtttctgagctatttatttcttctccttttacctgtttctaatctgattgaattgtggtgctttcaacatcttaattatttagaaaatacatttgtatcttatgggtaaagtcattattttctcccttcaggttattattcatttctgttaaaaggtcttagttcttttcatatgcatattcttccagttgaacattagattgagttgaaaaaatgacagcaatatttttaatggagtctccttcttatacattaattcttctgaaacttacatcttaaaatatttctcatctagaaatgtgttatttttccatttacttaagcagcttgtatctccattaaagttttgttattttccccataaggacctcacattttttgttagggttattccaggtatttttacttttgtgatggtgttcatttatttttattataatatttaaaaaatctctggtattacgtcagtgtttttaaaacatgccatttttattcaatactttaaaaatatttataaatctctgagttggcaatttctccagctctaggaagacagaaaatacacagatctgtacactcaaagaacgtgagtccagcccactcagtcatatgaacttagctggatataacacgttaacagacaggatagacatttttaccttgaacagaaagagctgtaattcaagttctgtgtcacagatacaatccgtacattatggtttctttaaataagccataaccaattttttttagtaattatttgcttccagttattcatgtgagattattaaaataagcttatgaagtaaatataagatgtttcaaatattcctatccattgagaaccccagaaattatccttattgaaatttttagaaaaaaattagataggtgcacaggaaaatccttataaaattatgtccctgacagagtttatatgtataataaaaatcaagagggtgggtgtttctaaatattcaactatatggattgaaggcattgtggtaaatccattacaaagattatactgtatatttgttgatgagaaaatatatattcttacagctataaaacaatgagcatcataaaattctatgattgcaatatatgacagtagatcatatatgtatagatgtatgtccatatatacgtgtgtgtgtgtgtgtgtgtgtatatatatatatatatatctgaacaaatatgaaggacacacaccaaaatataccaaaatattaataacaatgattatcttcacattttaggtaatttcagcttttctctttatggttgctgatatagccttaacatttataataaaaaaaaattcttttgtagttagacaaagaagaaatatgtgaagccaaaataggaaaacatgggggaaggaaggactttatatcatgtttcatctcatagcaaaactattggaagcatttcagaaacaaaagaccttaaaacttcaaactctaataagaaattgggaacaaaaatcttgagattgttatacaagagatgttaaagaccttaggcctcagtttctttcagaagcccagcaattgcaattattatttattatcactttacttttgcttgaatctctttagctaaaggtggtttacttccacttttccctaataatttatgtcttcatgataatagattttcttattatctttctgatttgtacctgtttcctatttaatgatttactctgtatggcatacatgccaaagttatcatgctagaaaaattattatgctataataattatgataccatcaaactgaattaaattatgtttcattgtaaatagtaaaatgtattaatttttttaaaagcttttttatgccagcggagataaataaagttacctttatgtactttcattaaacacaatgacagtacaagccaaactgataacaaatcaacgcactccttcttgtaacactcctaagttgttctgaaatcagctttcttaggactatgaattcaatgcaatgtattaaacagaatctgtgccttctgtgaataaaagtttcacctccatctcttgtgagtatatgtaggcagatctttgaacaatgaggttttcttccattgatttaaaatgaaaatgaacctggattttaaatgtgcattctaattgtccctttagcacatcagaacagcactgcctaatagaaatataatgtgagctacatatataattttgaattttctaaaatgcacattttaaaaaagtaaaatgaaacagttaaaactaatttagtagggcttggtgcggtggcttacacctgtgatcccagcattttgggaggctgagggtggcagaccacctgaagtcaggagtttgagaccagtctgggtgacatggcgaaaccctgtctctactaaaaatacaaaaattagccaggagtggtggtgcatgcctgtagtctctcagctactcaggaggctggggtgggagaatcacttgaacgtgagaggcggagtttgcagtgagccaagatcacaccactgcactccagtctgggcgacagagtgacttagtctcagttaaaaaaaaaaaaaaagtaatataccttatttaatacaatctatctaaaatatcattattttaacatgtaattaaaacctaaaagttaatgagataatacattattttttctaccaaatctatgtctgtattttacacttataggatatttcaatttagattttttatcagatatattcagtctgcatttagatgtcataagttttcagttgagaaagtagatccacataccaaattgtttcaaatgtatttaaaagttttccagtaactgaatcaatgatcaatttttaatttaaattcattaaaatcaaattagaaattcagctcctcagccatactacccacatttcaagtgctcaatagccatatgtggataggggctattgtattggacagcaaaggtttagaacacatgtataagatgttaacacagaggaaaagttaaaagttaaatcaatgccaaactattgggaatgttttgtctaccgggtttcaagaaataatgacatgactgatatttttcttattgaatcagctgctcggctggttggctcaactaatagagtcaaacagttgctgggttttataaacaaatcatctccttttttatttggtcctccaattttcttaaggcaaatatttgtgccaaattatgccaaagtctgtctctcctgaatatccctgttatcctcgaatattgttgagtgtcccatgaatataactgttaaatgctgttttgagttaaaaccaagaacacctatattgagaaaaaaattaaatgtagttaatgttgtaccaccatgttttgttctagcttctcaactgtctcatgtaaataagcacaataaacatctactgagtgattctgtaatagtttggatctataggtccatcatttgtgatgacacatagaagttggcccaggaaagctaaaagtatgtcatatgtcaaataatgccttccaccaagtttagagcagcatttcttccccagcattacaacttcatgtaatggcacttggcagtattggcatttctgatatgacttcttttggctagttcagaattcttaaaaaataaatagtttttcaccctgtgattgaaagggttaaatagtaccaattcattacactcacaaaaggatttattttgttctcataaatcagttttattccacatttttattattcccttgggtgagctactccaattgaaatcaatacaagtgcaagtgagacaatcaatctcgatatttgattatggattggagattcccaggtccgctttttagccagtttctttctgatcatctcccccaaagaactgaatatttttattgacatctatgagttctgaacatgtttagaaagaagataataatcttcatttgtatactgacaatggaagccccacaaatgaacaaggattaaaaaataaagacttaaaatatgtagctataacatcatcagcaaacttcaaatttctcaatatttttcttaagatgtagtcatgttttaaaataactttattctttcttttaaaaaaagacctgttaatacaactggtggctacaaaccacattcttagggtgctattaggtaaatgattatttttcatgacaaagatattatttattttcacatgcttgtttcagagctgaaccatatcaactggtctaggttaacaataagaaaacagttaaggtgaataaaatgcctttgaaggtatccagcctaggtcttttcatttctataattgtccaggctggaaagccaccatctgggggatttaaaagagaaaaacagctcaactttaaattagagagcaaaattgattaagttgttcctcaatgaggccaacatttatatatcaaactctctttgctttacaaacaaatttatatcttatgatcctttacatatcgaatgcttattttgggactcatggtaccatattattgttctcttgcctctgactctagccacctgttctaggttcttaagcaaaatttttgaaaaggcacaattaaacctttccgtaattcattatttgatacttagaataaggcaattatttgatgcacttatctaatcatattcttaaaataaatttcaaggtaatattaacactgcatttgttactttcagcaaacattttagccttatttagccatttactaattttcactagaatccattggaaggggatgtttcatgttttggacaaattacctaccactgattttttttcaggaagacatataactttgaatgttgtaaaaaagtattttagaaggagttaaaatagtaaacccatatttctttcatttaagcaacattaattactcttcagttactcttattaagcctttagaatagcagctgtataagccatataagccaggcacttggatttccactggcaaacttcctaggcatgtggaattaggggactgtctagaacttatttttgtccagcttcatttccttttcagtaatttgcatttattaatgctgaataatgaaagataatcaaaacattaatgaaggtatggtgcagtgatgtaacaaagggctatatcaacaaaatattctttccacgtgctttgttccactctttaaaaaaaatatttactcaagagaatcattctagaaactggaaattgctccctttattcaggaaggcagtatattttttaaaagttagcttctttaattgtttaattcagaggttggcaaatcttttctataaagggatagaaagtaaacactttagactttgcaggcaatatagtctctgccataattactcaattctgcagttatatcatgaaaattcctagaaagataattacttttgttctaataagcctttatttacaaaaataggcagctggccaaatttggcttgtagattgtagtttgtgggaccctgttttattataactcgtttatacattaaaatgcaatttacatactttccttggatatttcaatcttctcatgattcatttgattttgcaaaaattatgaatgctaatttaaaaatctatgtaatacagaaaaacaacatccactaaaatcccactacccataaataaccaatgttaacaaacagtaaacattattttagagctgtctcaattcatgggtgattcttggtagcaaacaacagaaacaaatttggttaattcaggcagagatgaattatattaaaggaattcaacagttcaaaaagttgtcaggaaagctggagagtcagacttgtggagaaccacaaataacatagcccagaccagcttatgccttcttaggacacccccactggcaccatcaccattcagtcgccttggaaaattatcactctacttctggattctcaacaattttagaggcatcttgaataatccttagttgactgtgagccattgtttcactggatcaagctttgtagtccccagatgaaagcaatgcaactgactggcagtcccatggtcttaccacatgaacttcaggtgtcctttcatttacaaaaaaagagaaaattaagttatgtttctaatcatttctttctacatacctattatcttctccctgattgttagagtttcttgatctttttacttatgcattaattatgattctctcaaggcttttcatcataccattgatttagattttagctctattctgttcctggctttttctaacttgtttattaaatacttactgcattttttaatttccagattgtttctctgtctctgcaatatcattttatcatattatagggaatatatatcattttttcccaaactacatggttattttgtctttttatgttacaatcctttctttagctgtatgtataatactcgatatattatttttttcttcaacttcatcttgcttatgccttgtatgggcagctctgtccagattttgcactggttctgagcttggtctacttcctttcctttctggtgctagtcagtcttctttcgacctaaattttgagcactaggtgttgctagagggtgcgaagatgcactgggcagaattctggggaatccagattttctgtctcctctgagatcctattatatagcttttgtggcagcacttgctgcatttattcacatgtatctcccacacctgggaacaccagctttttcccccaactcagcacagtgcttggcaggatggccagccctgatttctcttcctgtctctgcagactctactcagttcatttctctacatattggagaggattttttttggcttatactccttcctctgggaacaaagttaggagctgcgctatactaagaaggaatttaccatctctttcttcttttaggtttcaaaattcatgtcggtcatttttttccttttcctttatacatttgtacctggagaatcttcaactaaaattgttaatgttactgttttcatagtttgtttccattctgtcaggtattttggaaagacagttgtgtggtaccacttaatttagaagctgtgaaagttcacaatttgtccaaaatctctttctagcaaggtgattcatatatacagttcagagactaacagggagactgtaaggtggcatctgactttccccacctcctggtgttcatgtccttgtttactctccttcccttgggtgtcttcaaaacctgtgacttgctgctcaccagtagaacagaacaaaggtgatagcatgccacctccataagattgtaacctgtcttgctagaagactccctctttttgatacagcaagtggtcacactggggaggcccatatgggaagaaatgagggtgaacgccaggcaacacaaaactggtaactgagagcagccttgagtcaatagccagaaaaaattgagaccctcagtctcgacagcctacaacaaattgaaaactatcaacaaccacctgagcttgcgagagatccttcctcattggaaccttcagatgggatttcagtcctggccaacaccttgactgcagtcttttgagaccctgagcacaggacccagttagctgtgccagactcctgactcacagaaactatgagattctaaatgtatgttgctaagttcgtggtgataccatgacacatcgataggtaactaacacaggaacaccttactgtgtgactgtagcaaatgaaacaggtagaattcaacagcaaaacatgatatcattctcatccagacccccaagtcgttgctcttcttttacagaggaaccatctcaagtatatatcttccagtaattagaagaaaatgttaaacatgtcattaaacaaagaatggaccataggctttgtctgggatcaataatggttgtcaaattacttgtctgatcctagtagcaccacaggctcagcaggttcagcatggttagtaaggctctaccagaactttaaaaggaaacacgttttggtgataaaatagttgtattcatgtccagtgtttagtgtggaagccggagaccactttctatgagagtatatttgttcaataacttttagctgattgagataacagcatcagtttgttcagctggaaaaaagtttgcccaaatggcaaaaaaaataagtcaaagtggaaaaaaaccctgacatttcagagcatatatggttagtaaaaatagaccatacttctacaatttacaatagtcacagtacatctctgaatttactctctctctctttctgtgtgtttatatacatatatatagtgaactgtactgaattttatatatcgtagtgaactttatatataaaatgtataatatacatgcatatatacatatatctttcatttttataactatttttagagcagttttaggattacagcaatattaagcataaggtacagagatttttgtctatcctttatgcattatagttcctttctgatattcataaaatgagatacatttaggaaaatctgactgtggtacatagagagagcttgatggggaaaaataaaacatgcttcaacaaactttaaaaaataatttgcgatatttagaacagtaattgtgcctacacgttaaaaaagatctagagaacaaaacataaagattctcgatatctatagagttgtcattgctcttgtatgggcacaaccaggacaaatgtgtctgaagcatcttttggtgagttgataaaatagtgcatgtatttattccctgcactacaattgtcaggctagaggaatgaccaatttaaagaggagtcaaagaagtacagctttgactagatgacaactaattaaaatcactattacagtaattacagtaatgtaagaaatatgatgcattaatcgagcaccgtcctcagaaggtcttagtggttcataggctatttatttctctttcaaaatatcctgtggagaagacagcttcgtaggcatatgtccataaatattttatacattgtcaaaaacttaaggccaggaatagatttctttcaccatatattaattacaaaataaacaaatactcagcacctttcagattcctaccaacatgagatctatcagaaaaatggaatctggaagaaacacttgctttttggttaaaataatttaaaataatatttttagaaggaataaataaatgtaacttaaatattaatacagggtatatagagagacctgaaattcttggctcacagtaaaggctgattttgccagtttaccttgatcacaattcagtgtcttctgattttggtattggcagaatttcgtgatagtgagatggaactgaacaactctaaaattgagaccttaataccagaaaaatatagtatttctttgtacagcaagaagtgggaaaaattagttaataccttttctaccttaaggtgtaattggattcagaaaaagactaacttaaagcaggaccaggcctgacatataaaatcctcacgaggtaacaagaatcagtttggtttgttcactgtcatttctcattataatctttgtcatgagaatggattcatgttgtgccattttctgttcctgttacaatctttgtcacatgaataagatatcaggatgttaatgcctggcatacagtattgtgtgtgttatgatactgtacaggactacgctgacctttgcaatattatgtattctgattggttgttcatgtcacctctttcccacaagttaataaggctgtaaaaaggagagaactgaaatggccagccagtcaaattatagaatattgaaaaggtcagagcagtccagcacagagaaaaaaaaattatggaatatatggtgcattaaaattcttgtgacaatgattgtaacaagaataggaaaggatacccatttatgttattccaatctagagaaccccataggatggtattctcgagacagcaatcatttacgcatccctgagtcatacatgtgaaaatatccatttatgctgttttttccttaaaaataattgcatagattttctactattcaacaaaaaagagcattgaaaataagattttcatctcagaaaaggggcattaatattgttaacatttcagttaagactttatatttgagactaaagaaaaggtttttttataagtaaaacctgttgttcatatgagatttatttggtctattttttcatgtaacacttttctttgaaataaaataggagagtaggactgaatgaattaacctttttcaagaccctttagaatgtgggatagaccgaaagagcagttaggagtttatgtagaaattctacatgatctatgcaaaacttattttatctttatgatgtgtgatgttggccaatacacaaaaaatcttttcttcctctgcatcttcagtggaaagatagtgacagagagaaagaggtataatacttaaatcagaaaccctgatgttattgttcttaagtgtgcaataattacttatttttcaaattgtttttatgcatattttaaattttcttgtagaacaacttcattggattttgtagcctataaggagacatctgttttaaaccttagctttacacttatttcactaatagagtaaacatgttatagtccaaagctagtcaaagctagtgatcccagcaccctatgctctgatgctcatccagtaggcctggcgtagaattcagatatatgaatgtttatgaggtaaccccaagtgattttgatgtaggttgtgcctggaatattggtattggcaacctcattttgcaaagagctaagtgagacccccagttaaagcccaatggctcagaccaagccacagagggtggaggagggcaactcaacttcaaatcacagtgcttgggtgggggcgaagcaggcagtggggagttgcggttccagaactcagaagcttaaaaggtcttgcaccatccacttatactcacaaatagggtcagattggagggccaaccagacaggaatggtcgcctgcgataggacacacttatcactttcacattttcaagcttgatttttgaggctgaaccaacgaggctgcattttccagcccactgaaagcccagtttatgcagtgaaaagtggcaaagcacaaccatctcaacaagaggaacctgagcacaagcattttaaaaatctacccctccccgcccatattgaggagcccaaattcctaaagttcaaaggaagaaaggaaagacagtgagagtgaaatggaggaagagctaaaatctgtggatcctgctttggttttgaatctggaaatttttgagcttcattgagggctgaaatcctgtcagttactctaggtctgtgaattgaactgtatgtttgtaggggtgagagaacattagactcactcagctgtatagttactggagatgtacaagttcttttttgagctgagcaaaatggttatgtaattgcatacttctcataattattgagtaattatatacttcttataattactgagtaatcattgttctataactagaacttaatgttacaactaattatataattaccatgtattaatgttgttatctaggaagcttagaatgaagtgctacttatatatctccccctgccatgccattttcaaagcaagcagtagtgtttgttttttgtttgttttacagttcaaaatttccttaaaaaacaaacaaacaagcaaaatgcaatggaaaaaacttcaccaatattatactcatacatatttactcattgattttgtatttgtccctggctgaaaatttgtaaaattatattctcatggcttaattttagaatttccattgttgctttacaaatttcaatcttttataagacctgcacagttacgctacttgagagtcaattgaatatctgcttgagtctataggacaagctgacctttttgaaagtttacaattgagcatgtaatgacagcagaaatacttccaaggagctcaatatcatggggacaggaggagatctccccatgctgaccatgtaattgttcttaggcaatggttaggatggtcatatttaatcttaaccaggtttcttgagtgcaagaattatgtcttatgtacttggggcatgttctcgtcagtgcctagaaaagccttctccttgcatgcagttggagctcaataatcttcagtagaagcaagctgactagttgtaaagaacctaggaaagctaaaatggcataaattggaaatgtctttttagtgcataatgaaattatcaaaggctgctttgtaggtttcataatgtcttgctaataagtattacacatatagaggagtgcattatctacttacattttaggaccttgaaatcattctttaagctatgaatatgtctttatctgcctttactgaaagtgaatagaaattatcattgtcacgttttagcccacaagcactgtttatttcctttgaagtaaactacttatttggatgtgccaattttgggtccagagtaataaattatattatgccattagggctttcttctgctcatgaaaaaaactcctgagtattttgtaacagtagatttttcagtgacttcctccatccctaaatggttataagtatctttttaaataactttttgtatgtttttacaatttgttggacctacccatatttcatgaaaatagtcaagtaataaccagatatcagaccctcttttgcattatttgatcttcattaatttcagtttgaaatataatctgatgggacaatgacacattggtaatggatgagattagtgctgctttattcattgaaaaaccttagaattttgatgaataatacattgttaggttggaaggggtagagaataggtaggtaattgctactgagaaaatgaaatacagagtacaaaattcttaatcacttgctagttctgaatggctagaatgtatcagttgtatggattacaacaaaaacaataacatcattcctagctgttgtttatgagcaactattatgtgctggatatgataaagaaataatctcacttaattttcacaatagcactgcaatgtaaatactgtattatcattcccagttcacagatgaagaaccagacattcagaaatattaagtaaattagcaaagagcacattgctaaagaatacaagaacaagttcaaatgcaggacttttgacaaccaaatttatgttctttcctttgcactatactttgctactaaactgtgttaaaatataatgtttttgtaaatattgtaaaccttgcattttgtatactatacgatgcaagatcacttttagtatgatgccatcttttactttttaagcatttgttcaataaagattatatcagtatctggagatcttgccagtatgcttgttcttctctttgaagctcaatatcatgtgttttttaattcatttgtctatatctgcagaatttgtgtgtgaaagattgaatgtacatataataaaaagtggttttatataggaaaaaggttatttgaagtaaatattggtgctcttttagataaaaaaatctcactctgtgacccaagctggagtgcagtgacacaattatagttcactgtaatctcaaatttgtgggttcaagtgattctcccacctcagcctcctgagtagctagaactacaggctcataccaccatgaccagataatttttaattttaattttttgtttttagagatgaggacttgctatgttgcctagcctgggtggtactcttaatcattcatttttctgttttttaagagttattgtatcatttctaaaagtgacaaacattaagcagcatttaaaaaattgtctcataaatttttcaggaaagcatctaatatagaaaatgttacaattttcatctgtagcccttttcttattttaaccctaattttttactcttaacctgaaatttaacctaatggtgtaagagagagagataaaacactgttactaggcagaagtattttcctgcattttggactgatgagatttaagaatgggtttgctaaagctttggaaggacagtggtgttgggaccagggtgaggatgtattaaaagtgattcttttatatagctaggcagcttctgcattttctcataaagctaaaaatattagatcttctgatcaaagtggacatatagtacctcccatccccagttgcttttcaagatattctgactaattgaaatttaaaagggcattagatagaaagaaatccacccacatttcaagcaaagtgaacagaaaacacctcagtttgtgaaatatacaatatctgacaaatatgtctgagtataatacgtatatccagaacaattctatttgaggaataatgtgttatttcttcctgtctgcacatccaaaaaaattcagggatttttattggaaaaaaaaccctcaaaaaagtataaacaactcatcaagtaatcaatttctacatttgtgcaatacttttacttatatgcttgatacttgtgatatggctttatcctacagttatctaagaatattcatcaaattatttcgattgccgtgatgaatgaattggccaggtcaactcagatagcacttttgttcacaagataataaaatccaaatatgtgcattgatagaagcacatgtaatgcctcttagagtggtaaagttacagacctatttggtacagtatatttagaaactcaagaaaatactcaaataatagcaggaatgaattcttaaatatgtatttattttaataattttcttttttaatcagtaggtaataactacacccttctgaatgtcacaaaagtcatgtacagcggagaagagacaaacctttgggtgctcatcgatgggctggttccttttaccaactatactgtacaagtgaatatttcaaatagccaaggcagcttgataactgatcctataacaattgcaatgcctccaggaggtaagtctatgcaaatgttggctatctaattttatataaatgccctagaattaagtttccattgaataccttgtttatttttagaggtattttattttagaacttagaggctcaattgtatttctggttcttttaatagttgttgttttgctttgtttattcagattctttaattgacgatcttttattgttttgttgagactgctttcatccacctcacactgtgtgtatgtgtgtgtatataccatacacacatacacacacacacatatatatatctggatttctgcatgttaagaaaattgggaaatgattttgttcaaggcgttacttaaagccaaaatttatatttgcaatttgagcttccattttctactgcaaatggttctcattcctggtgttctaaataactagttcaattgtatacttaaagtacttcatttggcaaaaagggcagggtgcagatgatagaataggaaaattccatttgcactactggaaaacacctttaaattcctgatcctaataattacagttcagcagggccacattcatgtgtgaaatgtgatacagtctgcatatttttattttaaatatttctataaaaatcgacctattcacaattaccattattttgatgtgccttcagcttcaccatgttttaactcgttgcgggaaataatcgcattgaggaaaacccctctagggttgacatggatggcccttgaacagaaagcatgcctcaaaatgttaagagcatgactctcaattgagtgctaaagaatgtgtgttttctgaaaatcctgaaggcaaaggaccccaggacatccagcatctgccctgtagcccatctcccaggaatgagtatattctgaactaagggagaatgtcacaatcttttatcagcaatccgaagggcaggttaaccccacttccagttatgaagagtataagaacacaaagtgctttatcactggagaaaaataaaagggaatcttcagtttgtatggaaccgctcccctgcaaaaaagattcattacttgttgtatcataaaaccacacactattatctaccttttatgccattattaaaattaatgaattgatgtttactaaaatacttgaaactgtaaatgtcagaagctacattacttaagaaaagaatgcataaaagaaacttttgaggctgatcaactcaggttagtatcatatttattgagacaataattttaaaagggaattgaatttagatatatttatttaaaaattgagactgaaacccaaaataaaacaaactccccccgctaaaataaaccttaggtattcatatcttcatttttcacttcaatacacatgctaggaaggatagaaaactgtgatggctctaaaccttagaatataatatcctttactcaaatttagaaattaaagagtaatcagtgccataatggaggttttaagttatatagtaataccttttctacaggatatatacaatatttaataagcgtgtttattttagggtatttatactgattaaatagtttgtgatttacagtaatttatatcatattcataaaatagggcaaatttaattcattgtttatgtttttaggaatgtatggtctaataatttgttatttatacatatatcaagattcaattaaaaatagcaaggtcctactgctaacggaatatgcgctatgtgaatatacctgtcagtaaaagggttaatattatacaaatagaaagaaactaaaatattgttttatagtggtgcagtcaaactgagtaaaccattaactgaggcttatcttcatctttgctctgtggatgcttatctgtgtcattaccataatgcactgcaggcccacactctctgggcctgatgcaatcctccactttatgtattcagaaatctagaatttgggagtcagtccttcaccaaagaggaagcaaatgtcttcaaagacagacagtgattcgctaaagtttattatggccattaggacatactttcttttttcattagattgttgttgattacaattaggaaacgtatagctttaaaattatcttttttatgaccttgtggcagtttaaaggtgatacctcattgattaaataggttttagttcatgcttccttttacttaatgatctgaaaacatattatcctgatttacacataaaaatcatgctgaaaagcatgtggcattcactagaatatgtgtgtttaagtagaattaaattagtactgagagttattaaagaaatcttccatgcctttgtccagtgaactgtgtttcattctgaaatgaataataaatggaccaatatacggaggcaaaccaacttatgggcagagaaggttctatatgctatttacttttccattatagttggattgttatcattattgccatttccttgatttcaatattagatctctcttatggtgatgttgaattcctagtatctttcaatgctgggtgatgcaagatttgtgatgataatatccttagctatgcttcttttgcatacttttaaaacataataagaaaagagttgggcaaaataaaatgctcttttttacttcatcaaatatttgctatcaaatatgacctggaaaatcccctttacccgtttaatctggccaaatcctactcattttttagcctcaaacctagaaattggtctatcagaaagtcatgttttgccaacagaggctgagatagggcctttctgtatcccagagaacagttacattatactgaaattgcctgtttaatctgtcacaatcactggttataagatcctatagagtaggaactgtttcttactcacatttctatcttcagcacctagactaaacctgacacatggtaggtgcataatgaataattggtgaatgaataaattagtcaagattgcttaacgacttgttttaaattttaagcttattattactcaggccctccaggcctcatctcaacctcagcaaccttgtattttagccagctgtgaaagagaccttctctgtacaccactgtccaatgtaggaatgctctggttatgtagataaaattgggagctcaaactgtaaggagggtgagtgtattggaggtgagaaatattctcaagttatgccaactcttcattcttttattcttccctatagtggttacttttctcaggtgagcatagaataaacaatccttagtttagatagtaatttggaaaggagaggtgaaagggtcatactccaaagaattttaccaggatacatcatctcttaatttgtagtcaggacacatcttatttgccagtcctacctctatttttctgatgagaaaaaatatataattaagaatatgataaacacaagttatttgaagatagaaattaaagtaagaagatggtgctactaataacttggcacatagatgaacagtggcaaatcccaattaacacacattttttatttgaaaaattcactttaaatattatttggacaactggaggggcgtctctgttttttccaattatgtagcagatccttccctacttctgcacactcaagttttttgtatttctacaattactatatttttaggttgtttgtaataacataatgctcatatttagcactaaggtattcttggaaataaaggatatatttaatcagagctcttgaatagtattatggtacaggttcaagagttctaggaaaagaattaaaaaaataaaaacgaatccaaatgttaatccataaatatgaaactttcctatggcctttaccccttcaaggtctggagttactaatggggttaggatttcaacgcttaatggggctcagtgcattagtgttttgtatgcatggaattcagcattcagtttaataagtggttgacattggtgatgtcccttaatttgcttaaatctaattggctcttttatcagtcaaacctgtatggattggcaattgatcagaaagggtcagccatgactctgcatgtagttaaatgatggaagcaccagttaaagtcacagttgcatgataataagcaaaagaagaacaaatgagcttagaggaggaaggcaaagaagcttagaagttttgcaggatcttcaagttcagaacaaaggcattatagagtatataaattttaaatacactgcattttgcctccagacttaaacctttttttttccagatgaactgaaatcttgtctgaaactgtctttgttacatcaaagaactactcagaaagctaaaagagacagaagaagcataaaagggcatagtttaaaatgattagtgacaaattccatactgacgagctagaaacagatttttaatgaaagttttatattattccaaaaggaataattctgtttatctttttctgaactgctttattgtaacagtgaaaggaacttggagccaccctggtttgtgaacctaatccaattttcctctgagagtaaataatttgtcatttgtacttttaagttgatgagaattattataatctacaaacagtgtaaaatactaggcttgagaaaatctgtttatttgcccaaatgtgttattagagaaccaaaaattgaaaaaggcaaaatggttgcgagtagtttgttttacagggtcttttcgactctctctccttcccctgaaccccctctccacttatccacctaaaatatcaatgagaaaaaaaagaaagaaagaaaaccattaggaagtaaaacttaggcacatcgcaaaagcatagacgttggagtcctagaaacaaggatttaaatccacctctttcactcactgcttgagtgactatgagcaaatctgcagatataactgagcttcagtttgctcatccattaaagaggctggatggtaattcccacctgactggaggattgaacaacatattatatgtaatgtgtttagcgcattgcctgtcttggtaaacatttggtgcttcctacctcttttgttctattttcctactaagactctttttggggacctggaaaatgccctatagaaaaagtaagtaaaaaaacctgtctttcacatagactgcagagaccagaataatttcatcttgctacatccctatcctttcctacacttaccccttaacatgttgacatacatatggccaggccagtaaccctgctaaggggtggttgtgatgcatattagatgatgaagtaagcaggaagcatgggaagtgattttctttttgaaataccttcagcatcctcctccatgacctccagatcataatttgcgaagatttttacatcaagctctcattggtcatcttgggatttcacatattttcttaatagaactcttcttctgtgtttatatagagctacttattaaatataattatgactttttaaaaaatgtctattattgtatattttattcacaaatgcttttttttacattgttaatgctagcccaaagcaagtaatttgaaattttatcctaagatgttttcatgttttcttaattgtcctcaaatacatatatttaaaagttacatcttggaattcaaactttttttcatttttcactaaataggaaagtttactagttgttcagccaatatgcttttgaataactaaataaaatgtttgcttttaaaagatgttagtatatgatttttgcccaataataccactaaaggaataatatattaatgactaacttttttagcttgaactactgaattccattctgtttagaatttaagagactggaatattctttcgggtattgctgtgtaacgagtcactccaaaagtcagcaacttaaaacaaccattctgtattatttctcacctgattgtgtgagttgtcagcatggttctcctggcttaaggaggctggactgggcttcttcagaattcccagaaagaaactcagggtttcaagagtcaagccctagtgtacaagccctgaaaacctttgcttgcctcaaactgtccaaagcaaatttcttgcccaagtcaaaaagcatgtatgctggaatgtatgatttactggagcctgataatttgtcaatcttccataaatgtctaagtgattggtttttagattgtgtatgtgtatatgtacaaacacatacatgcaagtattacagatacataatttttcttttaaattagttctgcttttgaaataatgatgtactagcaccaaaaaaaatgaagaaagcagtttactaaatttttccttgaagaagatataaaaaaaaatctttccttacatgacaattaattttgatgttttatttcagtataaagatcaataaatgtatatcaatagattcttgtttaaaatgtttgtagctccctattggagggaaaattctgatctcttcttataagtaggtgatttaaaaaaaaatcttagctatttctcaaatctaggccttgggtattctgatttctgcttgtaactttgaactgtgagagtagaaactgtgtgtaatttgaatattttctgtagctccagtgtctggcataaactatttgctgaataaattaccagagccctttgtggcagtgataacttggaaaataatcctgaaagttatattttgctattgctgtgtcttttacttggataaacattttccagaattaaattcaacatttagggtttaattcatcctaaaattatttttagtcctgttaagattaccataacagtgtaaaaatacataatataggaccctctggaggtatgtttataaatttgtgtgtgtgtttaattgtctattttacctaccattttattttttatttttaaataattccatcttttatattatgtttaggggtacatgtgcaggcttgtcacatggatatattgtatgatgctaaggtttcaggtatgattgatcctattgcccaggtagtgagcagagcacctaatagttttcagttctttgctttctcccactgttccccttctagtagtttccactgtaaccaccattttcaattaacttatctattgtgattggtggttgaacacttaactgaaaataatgattaaaacagaacatccaaaaatttaaatatatattaaacacaactttaatttagaacacataaatatatttatctatatatttatccaacaatcttgttatatagggccaagttgttttcttggagtgttaatttagtatttataagtccagcatatttgctgccaaaactatattcataatgcatagtttgatttccactttgaaaactcctttaaaaggagaacaaaaatttagagataattaaggaagaatctaattatagaatttttcaggcttttgtaatatcctaagtcttttagttatttttcctgaacgaatttcacagtattgttttattaagtcctcactgaaagtttttcaaagcagtaaattttcatagaaaacggtttctgttaacagtgctcatcagtttaagcattatttaattaaatgacataatcataatgacaaccacaattgacatcacaggtttaaaaaatacagctgactctttgtgagtgtataattctacctgcgactgcagaatgttgcccttgaactacagagtagtcaactatccatctctgcaatacagagtaaatgtaaattttttattaatctggcaagtcagataagaataggtaggtaaggctgggcgcggtggctcacgcctgtaatcccagcacttcggaaggccaaggagggtggatcacctgaggttgggagttcgagaccagcctgaccaacatagagaaaccccatcgctaccaaaaatacaaaaacttagccgggcatgttgtaattccagctattcgggaggctggggtaggagaatcgcttgaacccgaaaggcggaggttacagagagccaagattgtaccattgcactccagcctgggcaacaagagcaaaactctgtctcaaaaaaaaaaaaaaaaaaaagataggtaggtaaagcaagtgtctactatttaggaaaaagacacgcttccaaagtggcagaatgatccaccctcagagcagcctacccaagtaggagaggcaggacaatgctaccaaattcttctcttaggttaagcattaccacagctctgccttaaaagaaaaaagaaattattgattatatcccttcaattgattagggactgagtctgagatttgtggcataacttgctcagtgaacttatttttctccttcagtttttaaaggaaagaactgagctttctcttctattttcaaatttcaaccaaaatctctttctaagaccttagagcaatgaaatgtgtgggtagcactatcaaccagccaggtggagaatggtatttttttttttttttttttttttgcagggtctctaagagaattaggggcaactagaactggctcaaaaagcaagaatatacgaaagagcaaaagagtaaataaataagaattgcaaaaacaaactctattgtatcttgcactttcttcatgcattgtagcactgagaattgtaaaatatttctataccttttgtttgtttttgttcttgtttttttgagacggagtctcgctctgtcacccaggctggagtgcagtggcgcaatctcagctcactctatgccttttaaaatcaacttagtacaatgtcaagatgctactttttaaaaataaaactaatggttctcaaaaatgtgaaagcttgcttgccgagtacagatataaagctcctcaatatgtgttttccatttttcatctgctctgtatccacttagatttatttgaaatatataaatagaaacattaatgtgcaggtggcaatgggatatcttaaaaattgaaagagtacaaagggatggagattttaaaaataaacgtaggttagcagctgaaataagcaataggctaagatggtatattcccttattcagagggtagaaggaaagatgagattaactgctttttataatgtaaaagccacaatgaagatacaggatggtgaggaatagcattctttaaaacgacaacattctaccacataaacagatggtttgtctttaccttcagtatattaaaagctacacaatttatattacatccagttcatatgaatctttcgaatagttgtgcataatgttttacttctgtgtatatcttccaaatgtgctgctattttttccctggaaaaatcaacccattgaaagtaataaagtaggagaattcaacaaataaaaagtatttaaattcttaataaaataaatagtgtgctttcaaaaacacataccaggccatttaatttaacccatgctttctcccaggtacgagaatagaaccaaaggatttatgactgtcttaaacatgctctcaaatcctttcctgaaaagtgttacctttacttttttggaattgatagtttaacctgctttgtgtgtgtgtgtgcatgtatgaagaggtatatgtttgtaatattacatatcataagccaaagagagggataaattcctgtttcataatttgtgaacaattttttcactttttgtattcaccatcttgacaatgaacttcctgcttataaaaacaccttagaaaaagactaacttctgagctatggagaagagggaaggaaactttgaagtgtgcttactatggactcaacaagcctccagcaaagggctgccagctctccatatttgcatactctcatgtggattatatagaaatacacacgcccacacacacaattaagtgctatctttaaagcatcctggggcaagagagagagacttaaaaaaataaaataaaatcacatctttttcttttttaccaggggagaggggtgggaaatattgttcctttaagttccattgatattttctaactcacatttttaaaaagaataagtacaattcattttctttttttttcttcgaagacggctttatccataactttaagcttaaaaaaaaaaatcatgtctgtctgactgacactgcagtctaaaagcaacttgaagttttatttgaatttttatagtgccctaaagaaatttttgctttatttctttaaaataatatcttgttcctcattttttcatagacaaactgtatgcctgacttgcataaaattctatgaacatttacctgcctatataaatactcacaaaagtgagaaaattcttaatatgtcttagatacttagagaccatatttccaacctcttttcatcagcagcatcaagaaaatccctttttctatctctataaaggcatatagaccccccagagtctaaaagaaaacttaaaaacttaaggaagaatagattttgacaacagtagggaaattcacttacaaccactatgcttttcatgattgttaattaattgggacaaatgaaactagaaacatgagggtatctaatatatactttattagattaatccctcttacactttgatgaccattttcaaatgtatactatctttcatttttatttaaatgtttcgtatgcttgtatcatgtcttatctactagatggggaagataaaacgaatgggctgggtgtggtgtctcacacttgtaatcccagcactttgggaggctgaagtgggaggattgttgagctcaggagtttgagaccagtctgggcaacatagtgagaccccatctctatttaaattttaaaaagaagaagtaaaatgaaaaaaaaaatgagtgggtgaatggaggtagacagaggagtcacagctggtctccctttttctttctctatccctctcaccatttaccttggctcaggcatataataggatattagtaatgattactatcatgctcttgtgcagtcctagtggcctggggctatttttgcacccagcataccttcaccctttcttttgatgacagggctccaatttccctctcagcaccctgggctctttcaagatcagaacatgcacatgcgctgtgtgtgaagttgactgcatcaccaggtctgaccaatgaggacactgtattctcctaaccacagtgattttttttcaggaatgacaggcattccaatcaaagccactgaattgcagtaaaccagtacagtaaacagaggcatgtctcttgccctgtatttgaatatgggattcggctcaatttgctgccagccatgttgcccctcaaagagtctgagaaatttagtcagcaaggaagaaagcagagtgggtatgagagaaggaggtagactagattctggtgacgtcatttgatcctttgaatccagcattgccaaaacccagctctttcccttgagtgtttttttgtttgtttgtttgtttgttgattacaggaacccactacccatctcattgcttaagcctctatgtgttgtgttttctgccacttgaaaacaaaagcatttgccacaatgcttgagagaaaggaaaacaagtagagagcatttagagaagtctcatcacttcctgaaaatcatgccaaatgctaaacttaacatatgtgtttggcttttgcttgggctctcaaattaggaaacctcaagaagtaagctggatgtcacatgagataatattttctaaaactgtgaaatggctcatcccattctgaagggtctcctcagagccacttcatttgacaatcttctgagctgtttctccactattttcaggtctcagagccctgagttctagtaataactcttgtgctaattagctgtttggtctgacttaagtaactttacctgactatgatgttggtctcttatctctaaaatggcagatgtgaattagatcagcagtatctatagtgtgatcccagaccaggaacttcaacattccttgaaatttgcttgaaatgcaacttctcaaaccctactctcaacctacttaaccagaaattctgagggtggggccaagcaatctgtgttttaatgagattccattaccaactcccaggtcactgggtgccttcacaagtttgaagaccactgagctagaccatctttaaaatactttcaaagaaaaaatatatgatcttgtctatgactttattccatattcatatttgagacaaatactcagggaaaaataggtataataggcctccatgctcaactggtctttgaatatataagtcacattcgtagggccagaggtctttccaatgtaagaaagccatcgtgttgctcacagtcttcctgaatgggccaggaacagataccaaagataaccaattccagatgttgagttctacctgtggcaccagaaagcaacaggcatgatgttttatgcactggggaacactaatcagccctactgtgaagacactgtcagctaaatttcctttgctcttcaacttcttcacagaacatctgctataagaaactccttgtaactaaaacctgagtctttcccctctggggaattttctttaatgagcctcttgtggctacatctgtacagttttgaaatatgtttcctcaagtcagttacatcttcatcctggattctagggtttgctgtctattggacctcatagctaagatttttccttctaggagttcacaaacacaactccagagtaggttgacatagtgcccagtatctagagaaaaattaagatcatgtaaccttttatttgctaaaaagagatttttgatgttgtgatcactcataccaagatagcatttattaatactaggtgcaggtgtggttttgcatatattaactcattttattctcctcacaaaccctgtaaggcaagtgctattattatccctatttacacataaggaagttgaagaaacaatattggcttgcaactagtaaaggtcatcttactagtaaaaggcagacactgtatttaaacctagagactgactatagaagcctagttctgagccactatactctattgttctactgactgtagaactatactctatttcttctactgactgttcatatgctctcttggcagcagcaacacagattttgatgccccactaatcaatgcagatctgaagaggtgacttgactctatagtagggtcaaatataattttaagggtattgttggttgaactagtaggtttttaaatcctgttgcagatggcctagagaactgtcctcagtgactgtataacccatgctctaaagtttataatgtcataagagaaaaaaaatgtaggtaaaacatgtttacagccttacaaaaaagcattaagcagaagcaatattatgtggtacgtaccctgtgtggagaaggcaaagaaaccaaccagttggactcatcctttgccagtgtggatataagtacttaacttgcccaccaagtattttgcccaacttctgtcatatttacctatgaacttctattataaattattataaattgtgatcttctgattgtacatagtttgcattcttgtgaagagacttaatttatctaatagtgttaattttgaaaaattaacaaactttcttaaaagagagcaagaaaacttatatttgtaaaaactaatgaaagaaagaatctttttcttcctgtactaaaacaattttctgtgaacagttgaaaaaacactctagtcaggtgaagacacttattcatatgtggaatattctagaaataagccatgtgaacagtatgagtatgtgggaaaattgttcactggaatggccacaaaatgaccatgcgtgacctctgggccataagaaagcaggaatactttcctcatcaaaatctgaagttgagggcatgatcacaggaaaaagcttaaatcttattcccatggttgatgctataaatcaagtaagcgtgtatcttagactgtgcatttgtaaagcacagtgtctatcaaaatatcacaattcaacttatccaccacttgctatccccagcattttcatttcctgattgtgtgaccttgagaaacttttctcctctctaagcctcattttgctcatctgggaaggggtttcataattacagaactttcctcaatgggtttagacaaggaataaagaatgtgtgtgcactgagattagctggcacattaggtagctgctcaattctttgtttaaaggacataaagcatgatatataaatacaaaatatatgtaagcttatcactattcagttgaaaattaacctgtaaacatctacatttttatcttctttgatgattccaacagctgtctctaaaactaagtgtaaggaaacagcagactggttgtggcatattaaattataagtgaggactaatttgaggatcaaagatgctctttgggagatatcgcctgactagtaggaaaagcattagctgtctccctctgtctcatgtatttgttctctctgtcttggaaatatccttccccacagtttctgaatcttgatgtttaattgaacacaaaggtctttgagaaacacaacagggggttgttcctggtagttctagcattgaggaaattgaaatgtacattttttttctcatttatcaaagaagggcaagaatctaaactgacattttatatcaaatgaattatgaactgtgtactttgtacctaagggaacaacaactaaattagagttttagttaagagagagagagagacaaaaataggctttgaataaaacatacagtaatttctgctactgtgcctgacagtgacatggccagatacagttctattgtagaactagtgactggatgcaggctactctgaaatctttaaatgtatttgagagaccgtctcagaaaaaattaaacctaaatttcttatgttgttagactttatggtcagtgaaatagtcttgataatctaaagttaactttcagctttttatcaatgcttactttcttaaaaaaaataatagttgcaaagttttacttcttgagaaagtatgaaattataggttgcttgagagggaaaatacaatgcagaataaaaataatatatatgaaaatgccacattccatctctcctctgattatctgtaacacctacacaaatactacacactacactcatatgttattgtgctcataaagagtgtgaatcctaagatcagtgggacttggttcaaatcttaatttcccccctcctactagctgtaagagcttcggcaagttatacaatcagagtctgctttactttgttcttctgtaaatggtagtaaataataagcactatctcacaggattgacactgagaacttaattatgatgatgcctgcaatagatacaacgtgatgcagtacacatagtagttgttacgttgcacagttgtttccttccctatgtgagaagattaggcagcagcaaattagaactccattatttaatggctgctgattcctgaagtataggaagtattagaattaaaattttaaggagaaggaccctataatgtctgtgcaatatatctaataatcattttttaaataaccaattgaaaattcttgggaattgggggtgattcatgctttcttcttctggacaaagctatgtattgattaccatatttttcttcacaaataagtattccaatttatgcaatataaaaataaaagaagcgttattaatatgaatacatttgttttagacttctaaatccccctaggttcataaacctaaaagtgacaaaattccttgatattaatcccatatgctttctgatgccaatgctatactggataataattttgtgactaaattactagaaacaaataactatcactgatagcctgattacaaattttcttcatataattattgatcattgctgtggtaaaatgaatatcataatttttattctcaaatgttgattctaactctactacttataaggtgaaatcagttcttagaagtctttcagcagtttaaattctgccaatgactattgttttattcttactaatagataatgtgaaattaatggcatgttgaggtaagggatgctgtcttgtccgtttaggcggctacaacaaaatactatagactaggtgccttacaagcaacagaaaagtatttcacacagttctggaggctgggaagtccaggatcaaggtgctgacagattcagtgtctagtgaaggctcttcttcatagacagtcattttctttactctaacttcacatggcagaaggggtgagaagtctcccttgggtctctattacaagggcactaaccgcattcatgagggctacaatatcataacctgatcacctcccaaggctccatctcctaatattatctccttggcggtgagaatttcaacgtaagaattataggagggacatagaccatagcagacaccccacatttaagtattttaatgctagatctagttagtatttgagtaatttaattaataaacttgaatattatatccaatcccgttgttacaatgacttttataaccaatctgctctgattcttcaatcattaaatgactaaatttttctccactattcaaagatcacttaatttcttggtatttgattgtatcttagaatagtggattcaatggcaccatagaggaagagtccaactctaaaatataatggtttattttctacacgacctcagtcattttttgttttgtttttgagaaaggctctcactttgacaccctggctagagtgtagtggcacagtcacagctcactgcagcctcaatctcctgggctcaagcaattgtcccacctcagcatcctgagtagctggcaatacaggcatgcaccaccacatccagctaattttgtattttttttttttttttttttttttttgtagtgatagggtttcactatgttactcagactcgtctcaaactcccgggctcaagcaatctgcccatctcagcctcccaaaatactgggattataggtgtgagccactgtacccagcccctcagtaatttattttgctatttttcttgttggatacattcaacaagggataatttaatgcagtcttcctgaaaagagtggctttgacttgagcttgaatttatttattgttaaccttgctaagcatatcaatttttaatttcacaaagactaaattcttcagtgaattattttaaatgaagtcaatgagcaatattagaatcaaaaataaaatagaattaattgaacagtattgttgtatatattttaaattatttttccaattgaagatatgctttaaacaaagggctcaagcaatcaggtactcaaggaaaaagaatttaatctatgctgcctagaaactaattggatgaatatgatcgtattcaaaataataggaatgctaagaaatgctcttaggaatactaagacgaattcaaatgtcgaaagcaaaggcttaactagagtgtctaaatgtaggaagtctctgtaaggaaaaggaaaaaaatttggttggtggtttgagacataacaaaaaaaaattcttctgggcattatgaccaccaacttcagggcctctaattagtctgacaaagtgacagttctacattctagttgaacaaataatgtatctaatgaaattcaaaatcgctatttttctctgagcacagtgagctgcatcattcacagctttggggtatttcaaaattaacagaggatgacttcagtctgtctgatgtttcttggttaacaaattcactgaaattgtcttgcagagcaattttaagcaattctttaatcttaaaccacaaagagaggtggaggtggaggtgtattaccttggtcctatggatgctaatgtgaagtggaatcttttatttctcaaaatggtcaacagcaattagtattcagtggtgtctttttattctggtgcccttgacccacctctgcccccctttctatattactcctattatatactgtaactggggatattcttgcttcttttccattctaattaaagcattcttagtgaacatgggaaccatttttcatttcatgaagaataattactggacctaggtgaaatctgcccattgggttttatataatttttgacaaatatttgcacgaattttgactgatctattcttaccatttctccgtgaaatgttggagaagttttcagttccctcagaacaataaacctaaatatgtacgtgaaagaccaagataaatgttgtaccaccttcaggttgtatttgctaatgtactttaaaatattttattttgtcactaatataagaaataatgatgactttttaacaatttttttttttatttttgcacatgtttctttcctagtcagagtttgacctaaatactcttctactacactagtgacaaccttgagaaatatcatttatttaggttggatctgtaaaacctatagctcttgttatacatcttgtttcttttttttattttattattattatactttaagtttcagggtacatgtgcacaatgtgcaggtttgttacacatgtatacatgtgccatgctggtgtgctatacccattaactcgtcatttagcattaggtagatctcctaaagctatccctcccccctccccccaccccacaacagtccccagagtgtgatgttccccttcatgtgtccatgtgttctcattgttcagttcccacctatgagtgagaatatgcggtgtttggttttttgttgttgtgatagtttattgagaatgatgatttccaatttcatccatgtccctacaaaggacatgaactcatccttttttatggctgcatagtattccatggtgtatatgtgccacattttcttaatccagtctatcattgttggacatttgggttggttccaagtctttgctattgtgaatagtgccgcaataaacatatgtgtgcatgtgtctttatagcagcatgatttatagtcctttgggtatatacccagtaatgggatggctgggtcaaatagtatttctagttctagatccctgaggaatcaccacactgacttccacaatgtttgaactcttgtttctttatttttctctagagtcctttctcagagccaagggtgtcttgacaagtaaaagagaaaaaagttactaaacagagagaaagagagagtaacagactaagaaagacagagacaatttcttcaaacctctactccaaaaaatcctcctcaaaatttaaacgacacatttgtttaaaacctcaaaattcttgcattctttcaaaacactgagctgttagattctaccaacagtatccgctctccaagttagttctttaggttcctgtgtgttggatggggaagaggtagggaaaggaggctagctaccttttatgtctgtgaggaagggcaaaggtctggtttggctaattttaaacaacattgtttaaaataacaggaacttgaactttggagacagttgctagattcaaacagcagcacaaacccctcattacttgtgtggtcttgtgcaagtcatttatgttatgaagcttcagattccttgacccacctacttcacacctaggactattaggaggattcagtgtgatgatacatacaaagcatttagtccattgcctggtgtacaataactgcccagcattaactctgacattgtagtgtgcttatgtttacaaatgaatatcaagatgttagcattgttcaaggggcaattaaccaaagtcattcattaaagttgttgagttgtttaataaacaactcaattaacataaagactctttaccaaaactttgaactttgttcaaatttcattcatccaaaagcagttgctgagctctttctagccaccaggcataactctaggtcctgtgcaaaacaggcttttggagcagatggcgtgcattccctgatggaactgaaggccctggccaccattgtggtgaagttcataactgcacttactgcatgttctggctggctacttaagaattccctaaggagatattggatagatcaaggtacttagagcttggtttcaccttctagggggagaaagggttgctcttaacaaaaactaggacaataaatttaaatgtgtttataaataatgatgtaagacaactatgtcaatgttgttaaagttggctgttacttttaagtacaaaattgcatattccttatttggtgggattactgtacatagttatttttagaaatcagaaaagttaattgatttactgtgattctctcgttttacaaaaatgcaaattgttttattatataagaagagtccattttagaccaaattcattcccataaaatgaaaacttcttggaaaaacaacaaaaaagaactttttaagaaaatgtattgattggtaactcatgacatttcttttctgttttgctttttggctcctgtgaatctcagaaaaaaaaagtctgttgctactcaggaggctgaggcagaagaatcgctcgaacctaggaggcggaggttgcagtgagcagaaattgcaccactgcactccagcctgggtgacagagcgagactctgtctcaaaaaaaaaaaaaaaaaaaaaaagtctgttgcttgacaatggctaaccttagtagaggttttgtggtacagttcactgatctttttccttcattattcagctttgttttcttgagttttatattaaatgtttttaaaaatattttggtaattatgcaggttaataaattataaaggatatctatagttttccccatctctttctggcattctaatgacatgaatgcagattccttattgatccatataagaatgagctcccagaagtgagtgtaatggaatcaagtagccagaaatacttagtaattggattgtttttcacattctgcactcaacttttatggaaaaaaaaaactcgaatcaaagtatatcaataagatgataaatccattcattccttttcagtatccagtccagtccatttaccagggagtagccaccaccatctgtgcctcaatattttcaaactaaacaacaattgtagtttctgtgcttaaaatattgatggaattagtgattccccatctccttcgtatacatttcagactctttatctgtcctacaagaccagtgtctcccacccttgctgccttgcttttaattcctcaaacagtgagatcaccatagagcttccggcccataacaggtcagcaaagtcttagtcatttaacaggtccaaacttaaataccacttccttagaaagcctttcttctttcaaccaaaattaagtcggccccctttaatgatacctcttagcacctctgttctccctcctagcactttgtgtacattttaactacatattgctttctatttgtttgatgccagtcttgctccacttgacaatattctcatgcccataatggtgtgactctggctagtttgttcttcattatgcacccatcacctggcacgatgcctggcaagggagtaaaggaggatgggtagatcagtttttcagggaatataaaaatgacagcacagttttatcacaaatgtttaatctttctgtatttccatatttatagcttggagattgcatagtaaacaggaaagaggatgaggttttgaatcaaaattctcatgtttgaatcccagcctggcacttagcacaatcacaaagaactgtaggaggaatgcaatactcacatcatctaattcatggtatggctgcaaggccaaatgagaaaaatggagatgcattcaaaaggtgagagctacatgagaattcatgaacacaaagaagggaaaaacagacacagggcctactcgagggtgaagggtgggaagatggagaggaacagaaaaaataacctttgggtactaagcttattacctgggtgatgaaataatctgtacactaaacccccatgacttcagtttacctacataacaaacctgcacatgtacccctgaacctaaaataaaagttttttaaaaagtaattgaaatgttcgtaactcaaaggataaatgcttgcggggatggataccccattctccattgtgtgactagttcactttgcatatctgtatgaaaacatctaatgtacttcatatatatatatatatatatacacgtatatatatatatatatacacatatatatatatacgtatatatatatatatatatatacacatacctactacctaccctcaaaaattcttagaaatttttttaaagaataaaattagacccctatctctcaccatgtacaaaaataaaatcaaaattggttgaaaacttaagtcgaagacttcaaactatcaagttactacaagaaaacattggggaaaatctataggacataggtctgggcaaagatttcttgagcaatatcccacaagcacaggcaaccaaggcaaacataggcaaatgggatcacataggttaaaaatcttctgtacagcaaaggatgcaatcaacgaagtgaaggaacaccccacagaatggaagaaagtatttgccaactatccctctgacaagggattaatcaccagaatatataacaactctataggaaaaaaactaataatccaatcaaaaaatcagcaaaatatttgaatagacatttctcaaaagaagacatacaaatggcagtcatatgaaaaggtgctcagcatcatcaattatcagagaaatgcaaatcaaaactataatgagatttcatctcaccccagttaaaatggcttatgtccaaaaaacaggcaataaataacaaaagctgtcaaggatgtggagaaagggaacccttgtaccctgctggtaggaatgtaaattagtacaaccactatggagaaccatttggaggtttctcaaaaaactaaaaattgagctaccatatgactcagcaatcccattgctgggcatacacccaaaagaaaggaaatcagtatgttgaagaaatatcttcattcctatgtttgtttcagcactgtttacaatagccaagatttggaagcaacctaagttgcatccatcagcagatggatggataaacaaaatgtggtacatatatacaatggagtactattcagccgtagaaaagaatgagatccagtcatttgcaagaatttggatggaactggagattattacattagatgaaataagcctggcacagaaagacaaatgtggcatgttctcatttatctgtgggatctaaaaatcaaagcaattgaactcatgggtttagagagtagaaggatggttaccagaggctgggaagagtagtggagggttggggagaggaggggatgcttaatgggttaaaaaaatagaatgaatgcataagacctactatttgatagcacaataaggtgattatagtcaataataacttaagcgtatatttttaaataacttaaaaaatgtaattagattgtttgtaactcaaaggataaattcttgaggggatggataccccattctccatgatgtgcttgtttcacattgcatgcctgtatcaaaacatctcatgtgccccaataaatatacctcctatatgccacaaattaaaaaaaaattaaaaaattaagaaaaaaattgttctcaagtgattaaaactaagatggctgggtaatttaagctctgtattgggtataagcagaacatactttttctaaaccttgtgaattttttaagtggttacaaaatattataggatcagactttgtaatttcataaatattattattacaaataatgtatccagagcgatctcaattatgaagtcatcaaggatgggtaagaaaattacagagagaagcaataaatctgaatgtacagtgcttatcttcaagtaacttaaaaggaactatgaacaaatgttcatagttttttgggatacattaaatgacttagtgatacttaagaagatactttgattgatgttactaagaaataataaatgagtaaagcatgattgtagttatggtgtgagtaatgatatgacaggatcatgtgatagacattgggggtaagataaagatcataacaatagcaaacacttatatagtacttatgatgtgtactttattatattatgtatatattatattgtgtaaccacttgatacattaacttatttaatcctcccaaccacactctatgaaatatataccatcttaatctttctttcgttgatgaagaaactggggcacatagagattttggtacttgctcagtaagtagcacaatcaggatttgaacccagataagttggctcttaaccaatacacagatctgcctcttttgtgatttaatcaaaataaactctaaataaagacattacaataaagacattaattagctgctaatcagctaattaagttaaaaatgtaaaaagtgctaattgaacataaaggagagtgacaaaagtgtgaaatgttcaggattatctaatataataaaaagcttatcaaaggtaaaaaagttttcattggaaaagattcatgaacaagcattctagaaattaagaaatggtaaatggccaataagcatgttgtaaatatttcaatcatagtcttttggttttcagtgctatctatagactgacaccttccttatgtatatgctcaggcctaaacacatgaactccagtcccccgtagtcaatggccttctaaaaatatcttaggcaatccagaaccaacaaattttttttcttcctacaccaagtgtccctcccttagaccagaagcttaggagtcaagcatccttctttcattctctacatccctacatctgttccatcaccaaatcctctatgaacaatactttccagactcacgtcaatgaggcttctgccttgggtctgcttcatttgtgcttctcccagtgatctgcaaatctcaactcagataaaacctcatcagagatgccttccctgcctatcgcatctaacatgctaactttgctccactccctccctcatcactctcaatgcccttatattagaaatgcttctttttttctcattaaatgttagtagactttatttttaagagcagctttaggttcacagcaacatcgggcagaaggtgcagagttcccatttatccttgcctccacacgtgtatacccttacccattatcatcctcttccacagagtggacctccactgacatgtttttattacccaaagtccatagtatacactaagattcgctcttggtgttgtacatcctatggctttaggctaatatataatgacatgtacttaccattatagtgtcatatgaagtagcttcactgctctgaaaagcctccgtgttccatctattcattcatacagccctcccccaacccctggcaaactctgatcactttttatcgtctctatagttttgcctttatctttttttgtctttcatctcacccctcttaataaaaaccattttaatttgttcattactatattcccaggttatggaatagtgctaggcatataatagatgacttttaaatagctgctgagttaatgaattattatatatatacacacacatacattatatcagtcatatgtaattatatacaaattatatgacatgtagatatataatatatttaatgatatacttgtattattattatatatgtatatatagatatatataggcattatataaaatactcattttgatggggatactgggaagtggaccactcatatcttagtgatggtagtataaattcaatgttctggaaaacaattagtcaactaatatctgaaatagtagagcattcatcaacgtttacccgataactctaaaaagtgtccctaaagatgcatcattctgtatccatcaatgtcagctttgttaagtgaatgttccacatctataaaaatagtacatgcaattatttgaaaagttatgctaccaaaaatactgactggcatatatagtaaagcaaataaagtttactaaataatatgtaagtattcatcttaatgtttttcttaattatgtgcacatatatttgtatagaaaaaagacaggaaagattatctataataattttaccatggctatctctgggtagtgtaattatggatcattgttttcttcatttgttttataatctttaaagtttatatcataaacatatttgtacttaggaaaatacagatagtacttttaaaagagttctgtttagttctccaagaactaaattttatcatttgtttaataagtatttcatgagcaatactaaactctcaaaatttgttaagtgctctgaagtttacaaagataaataaaaagcatatctgctctcaaatggtttatgttatcattaccttggtttatcatgggacaaagcaataattagacttaaatttaaaatttaatggggttttgggagatgaactatggtcttgaaaacaaaagggacatgtatgaaaccacaggtttctatctactattcattgagacgttgcttagccttttctaaactcagtttttatatctgtgaaataagaacattgagagaaacgaatgataaaatgaatgtactctaaagtagtatttcagatttcatttgataatacctccaagcaattaatctcacttatgttaaaaatatttttcacatttttttgtaatttatttgtaaatagaaaatatgttcgggattctaacaattgttgggataatgacagaaataattttctctgcagatctttcccccatcaactcatccatctttcccccatcaactcatccatctttccaaccattgattcatccatccattcatccagtttttataggatctttcctagacaaagcactgtgttgggcaccatggtatctctttaattacttttctcctttaacagtcctttaagactatgtatacattagaaaataattaatctggtatggtcagctatctatatgaccattttgagtcagctacatagctgatatgaatgaacttgatgaactccaatattaagcaggccaaaattaagatgctcagtgaagtttcagcagcatcacttgaagaaaggaaagtcagtgccttcctgtgttgggctgtggcccaaacacacaaggagtgtaagtttaaaaggcattctcaaactggaacacatccaaatcagttaacaaggctagaagatggttgagaaaacatactatatggaaactagttggagagaacagagatgtttaacctgaaatggggaaatttagtggaaaggaaggcaaatgcttaaaaatacctgaggttctagcccacgaatggtaccagaggcttgctctcagggattagaggtaaggttctaaggagttcagtgttgttagcatgaccaaccatatgcactttttgcccaagatagtcccagtttatgcctgctgcatgcagctcagttcactcctattaattacttagagtgccccatttcactcagaatgtctcaatgtgaacaaaaggttatatttgccctaagttttgtagaacccatacaattctttgttctacatcagaaagagctttccaatgataaagactattcaataatgtgatgggacaacttgccaagtgactattttcctgtcactggtaaggcacaagcagagacctggggtcacctgtctgggatgttctaggtaaggattccttatttggtgagaggataaagttggtgacttttaagttttctgccttctgattttaagattctgttgttttgtttttgaatattctatggtcaaatatcagttccatgacatacctacgaaaacacaatttttaaaatatactctttctctcgctaacatgaagacttctccattttacatttcattgaatttctgtggatgttgactaattctggagatgtggcaaattcatactagtagttctgtgtgtgataccttgtggaatgatgggaatccctgctatgataaagaaataagaccgggaggtactgtttaagaatatgacctggacagaaaataaatccaacatttattgaaatttgtttatttaatattgtaaatggtttgcttttatatagatttaatatatttaatagttattctatattataaatcattcactatagcaggctgtttcagggtgtaaaattaagagcgcactgcctttgaacttaaacggcccatgttagaatcctcagtgtgccagttacatcagttctgcgatttgaaatgaaatatttaacttctctctgagcctcaccttattccgtatatcctacaaagagaaaacactacaattttggagtgtaattctgaggattagaaataattatgttaaataaccttgtacacagtatgctttcaaaaagttcgctctggtgaaagactgttttgtgaacatgaaatctattttaacctacttgtcactatttaatgctgctctgtttgtgcatccttgtgttcaaggttgactgtccatttgttagcacatctgcatattcctcataattaatatctttttaaatgacatatggtttagtgactggaaatcgagtcttgccttctgttttcaatttgttcatgactcaatgactcaatatatgtgtctgaactttaattttccattctggaaagtagaatttaaaacccttgctcatatgtagctatttcggaaaatgatgaagaaatgtgtaatccaaggattttgaatatgtgccaggctattcagcgatgcagcatataggtaaaaggccgcagtttctctaatgttaacagagaagcctaaatgagaatgccaaaaatgtaatccctgaagtgaggggataatttggggtaggctagagtcagattcctagtgaattagcaagaagcaccacatctaaatggaatgagcacaggaagagttggtgggagccctagggaatgaggctgagaacatcattaacctggatgaacaactgatagtacccccagggcagtgcttctgcaagccagggatctctgaaagacaaggcccagtgcacccctggaagtgagtttctaacttccgagtcccccgtagcatttatacctcttttgtgctgagtactctttttttggtgatacagttatttgagtcaggtctaatctgttaaacataaagtagattatttgattccgccttctacctattctgccctttccctgcctctaacaagaaccttgtgcagagtggtattcagtgtcttgtattatagaattgaatttgatacaaaatattacaggcttatttgatattttaatgcagcattttatttcactattttgaaatgcacacacacaggcaaaaaacaaaacacacctcaaaagtaacatgttggtgggatgtcctgagaaagaattcagtgcatatggaaagcacagtgaattcattttctccctaaaatattcttcttcttgtccccacagacttggtagccaccaactacgtttgtaaagcctctgtttttgcctttgagagctcactcccagagttttataaatctgcagggagcaaaggtttaggacatgtgtaaataaatcattttatattttttcgtttgttttattttgttttgttttcttagagaagtttaggacatgtataagtcattgtctatttggtgttttgttttcttttgtttttcatatagatgagagtccagtggcgtatatcatttttaaagtttaataaaattatacattcaaaagattataccatctcaattattccaatctgtgatttaatttattgcttaatgttttgtatgaatttgattttctgaagcaggttaaatttgaaattttattaaaaacccacttcctttgagtttatagattgggatagctgttttatctagtcgctgtgtagaattagtatttactggacaagatgtgttgattcaggaggttgtcttggagtgtttgccccgtgagggtcatattaaacttgagagaagttctttgagcaacagagcatcttggagacaatatatcaagctgatggatacagggctcttctgttaagaaaccagcagtggaattatggctggctcccagttattgctttggtgctaaggagcctctaaggattaaatctaggataaaaggggttaaacagaggggaaaggaaggtttccagaattcagtgttactggaagcatacagaatgagtagttatatacaaataatttaagatgaccattctgtttggaaatatttcacaatttaatatattcaaagtgtaccaatttagtggagcatattgttttgttattactcagaagagaattcgtgacatcttattattattataaagcctactttggggcacttcttcctactgtcttaatagaaaggtaatgtagtttttaacacataaggggttttgtgtgcatattaaaaactaattttttcagggctaatgacttgaaattcagaatttggattttcaattacattatactccttgatgtagaaaaattagacaaaaataatcaaaagagagacatggttttatatgttatacattgtatgcattttgcactttattttttgcctgtgttttcacagtgctcttttttctatgtatgcacttattataaatcaattaaagtatatatgtcaaataaattatgattgttaaaaaccatttgtgttcatagataaaaatatcaattaaaaagcctttagcaatgaatgtccttcaaaccaaaaatgtgaaggtaagaagtggatagttggccctggacagcaatcttcttgcactttctagtcatgccacacttttactaattgagagaattatttcatatcatttcctctttcttcaagcctccatttcatccacccaatttgtcactgagcctttgcttttattttgctcactaagaaactgcgcatcatcaaaggagatctttgctattattccatcactgaatctactcactgctctacatcttcatctgtgcattcacttttgcacaatgggagaactatccctgctctgtttggcagccagtgtgcactgactctcagttgattcaaatgtgcactggctcacctctctcttcccacactaggactttgctctggcaattctttcttttacggtatcatttcccctaatctgtgttagattcttccaacaaacatgcctatatgctgcaacatcttccagtctttagaaaaccttcctttgatatcatgagcttttctagctgctgccccattttctaatcccttttagaataaattccctctaagtgttgtctaagctcactgtatctgccctttaccccctcgttgtcttcacaaccttagctcagactgctatgcccagcactgcactgcatctgctctttgcaaagttatcaaatatctgcacttggccaaatgcaaagtttcaactcccagtcttcttcctccttaaactctcagccgagttgatacagctgatacgttcttcctttttcatgtgccttctttctttactcggcttccagtctgcaccttctcagtttttctcctacctcactgaccattccttctcagtatcctttcctagagaggcctcctcctgacctcaacattttggtggattccagggcttggttctcagacctcttctatactcattctatcaacactcacttcctagtttatttcaccatctcagcctttaaagatcacatatatgctgacctacaactcctatgaaggctacaactcctatgaagacttttcctctccctctcctccttagtccgtgttagccacactgttccttaaacacaaccagaatgttttcctccttactgcctttgaatgtactgctatctctggctggattactcttcctccagacattcggatggctacctccctcatgccagtgaagtctctgttcaaatatcactgaattgcattttcttcctataatcttcccatcgaattgaagttgttacctagtaactaaaactgcccaattctttttaccttctctttccttacactgctttatttttctacaaagcacttatggccacctggtattattgtatacacagtattcatttgtttaccacctgctccctccacttgaatgtaagctacctaggggcaggagtggtgtctattttattcagtgctgttcttcttccacatgaagagtactgcttagcacagagtggagccttaataaatgtttattgaacaaatgaatgaattattaatgaactcaaacccattacagcagattgatgaaacatgtaatctaattcttctgttctcatcactggtcattcattagcctcattgttcacagacagcttcttctgaattggagagtatgtaaaattgacacactacacaaggttatgtataaaataaagttgaaaatggaccctgatatttcatttgttctcattattttgatcacttctccttcttcaccaatggcctctggtaatttgtggtcattaggaacctatattacaataatcagaatgttcccaacaaagtatattatactagcaattaaattatgctaaagaaagttcaggtcagtccaatgtaataatagtaataatagttagtgactaataattaccagggtctaaaatcaggtgctttatttatatgatctctgaacttcacaacaattctataaaggaaaaatattatacctactttagagatcagaaaatataggctcggagtcattaggtcattttcctaaaggcagagttttgctgaatttgctttcaagtttctgaatagctttggaacaaactgatatgatttggaacaagctgatatgacaggctcatttgagttataccagttggaaaaaattaattaaataaccagagtcatcttatcaactttttttagtagaataggctttagttttacacattcctgttaggccttctagaaccattcaaagagatttccctggtagattgtaccaagcaggtatgttgaagtcagaacagatttgccggagactcaactagactagaaaaagtggtatgcatgttccaacttgcaaaattgagtaagggcaggagaagggataactctgagaagggtaattgtataaaacacatagggaaaaaagtttactttttatattttcatgggtgagcattaaggctggaatacactgtattcagccattcatgtttatttatcattccagaaaaatacaattttagctaacttcccttcctccaaaaaaaaaaagaaaggaaaagaaagccattgtgttcacatgtagtggtgtgattaaggcagcaatggatgatatcggggggaagaatatgagatctggactgcttcagtgttcaattgtttggtctgttgaacaaagagttaaatgaaaaaggtactttaatatttgcttcactaaattccctccatgttttcaattagataaacagaagtacaggtgggaatgtgctgcatattcatttgtcttgctgtttgggggccggcttttaagactgaaatactaatgtaattgtgttgaaatgaacaataaggaagtacaggagttcaggaatgaaaatgttaaattaaatggaccatgtttaacattgttgttgatcctgaggaacagtttttccagtatatggagcatttcgattccatccagcatatgttctccacagttttctctgctctaattcatctgtgtttttcgacagctccagatggcgtgctgcctcccaggctttcatctgccactccaaccagtcttcaggttgtctggtctacaccagctcgtaataacgctcctggctctcccagataccaactccagatgaggtctggcgactccacccatggatttctagagtgagcattctactttgtccattctatcagctgggttatacaatatagacataacatttttgaagagtaggtcagttctcatttgcaaaaaatataggttaccttttaaaagtacaaaaaaaccccaaacaattagaggataatcatttgctttgcaaaaatatctatttttcatttatgtagcatttaaagtaggatttcttcccactgaaacttttcatgagcacatgcattacataaagcaatgaaactaacaaaatgatgtctgaactgtcgctaacaaattataatacctattctacaaatccacatggcagtcagtctcaatactactaggatttacatctcgtataaacacaagattacagactcagccaatggctacttattttaaaagagatctcatttgatggcagaaaattacaatacttaaatgtatgttgacatcctctaaaatttttttgtagtaagaaatttacttgcttttatttctttgaatgtcgaaaacttcctaattgacatttatttcccatacaggttattttccaatccttctgcatcgttaagctatgaagtgagtgatctccaaccgtacacagagtatatgtttcggttggttgcctccaatggatttggcagtgcacatagttcttggattccattcatgaccgcagaggacagtaagtggtctgaacaatacacagccaaatgtcttctacatagggagcttaaaatgtcttcaattttttccaaagcaaagaaatgagcctcccttatttacttgttgtttagtgacaataaccttttctagggcaagagagtgagcaaaggtggtcagtctctccagaaagaagaataatgtggtcttggagggttggagggttaggcctacagacaggacaaagtaattcactataaattatgatatggccccattctatccttcagggtacatcttagcgccctgcaagagaaaggttgtcatcttctgctttatgactgaatgttctctgtttcggagaaattctggcaggcagaagaaaatgaaatatggaccttacttcatgaggctgcttacatatacttgttcctggaaacaggtttcattttcctgcttctactcataccccaaagacagccttcagcatagagaagtataatctgatagcagtatattacaaaaggtggattaagatttctttattcaaccaataaagagaattttctagttgttcactaaaaagttatttttgcatatatttgctagattatatttgggaataaatacatgactataacatttggttttatacaaattacctctataaaagcatatatatgaaagtagaggggtttttaaagaaaagttagaaattaaatcaagctacacagagtgaataaggacattgtatctttgaacagttaggttttttgagttaatcttgtgaagtcttttaatcataggcttcttaggcaatgttctctgctggcccattgccatgctggctctatatccaatgagaacgttaagtgactttcaaaagcctagatattaacacaaaagtatggtatttgcaacaatatcaattgtttattaaatgtattgttttatttctataatacctttaattgcattattttagtgaagataagacatcaaattagacattatcagtacaatctatcttgtttaaagttgactttatttttacaaaaaaaagccacctttatgagcaataatgtatgttacttaattcatttcttccaattcgtaattactccctgggagaaagttagctactttgcaaggggacactcagtgtttttgttctcaagggtatcatttagtaaattatcagcacagtacgataaatggcacccaaagtccagaaagcattaattcaccaccttttaggaggaacattacatacactctggggaatctggacaccatgatcaccagatttatggactgaagacttcacactcaaaatagatttttgaagaaacatttgaaacaactgaagatagatttgtaatctccttcttatatatagcagcatgcttgatggcactaaataaagattagccaaaaataattattcaacccactgcagaggtgatggctcaatagaatgcttggaagaagggagaaagcattttttttttggcacagcattctttattctcctagagaaagggcaacactcaaacttcctcagcggtaatctccccacaattttcactgaatgagggccatgacctgccatctataggcagggaggtagcacataaataagcaaaagtccaaaatattgtaaaataccaattagcatagcatcctttgttgagcaaacttacctttggtctcctttttactataaaacaagccttatagaccacacatacacatcgttagaattttcatacccagagaccctccattgttgtggtatttagggcttgagtttaaagtgagtggtattaacccttcattttccttaagtaagaattagtaacacttgaataaatagcaggtatcaactcataaccattatttgtgtttaaatccgttccccaaaatgaatgaactcttccttcctctgctttgtgtatacactgtgaagtcacatacatagcaaagaactggaaggaggccatgtgtacctgcaggttacgttagcagtgcacctgagacatggtgacagggtactgtatattttagatgtcagtggagatggatgccatctctgaaaggatatgcaattgagttgacaaagactgagtgattggcattgggcacaagcagtttttctgtcaaggctacaaagcattgcttataaaaccacccatgttgacagctccatgccagaatcacacttcttacttgatcctgaccagcacctcctgctcaccaaagtgcaattttctttctctttctttcttctttctttgtttctttctttcccctctctctctttcactttctttctttctcactctctttctctttctctctctttctttctttctctttctttcttttcttcctttccttcattttttgagacagcgtttcactctatcgcccaggctggagtgcagtggcaccatgtcagctcactgcaacctctgtctcctgggttcaagcaattcttctgccttagcctcccaagtagctgggattacagatgcccaccaccacacccagctaatttttttaatatttttattagagatgggtttcaccatgttggccaggctggtctcgaactcctgacctcaggtgatccagccgcctcagcctcccaaagtgctgggattactggtgtgagccacctcacccaacccaaagtgcaattttcaatgtagaaatttcacatatcgtcttacagaacgaaacagagaagtcgcctcgtgcccacatttaaattccataccatcaacaggcacctttctgcatcagccacagcctcacagctttccagtgccaaaatgggtcaccaatggcaatatttttagtgtgacatttcaagacagtgattttcagcaagcctgtgacacaggtgaaaccacaaagagaaatctaggcaggcaatgagctacagccagagaagcaaatgcatgggtgcagagaagttatcatggacagggaaacaggatgtgaagaattttaatagatttttttttcaaataatttgtcatttacaccagtgtgccaccaatatccagttccatgcatttttaaaaatctagtgtgctgatgccaaataatcataatgcacatttcctatgaatattttaaatcctgttaaatgtgtgttaataaaagatgtttgttccagccaatttggtcagtgtagtgtttaactggttgcaaccagataaatacaaacaacacattattttttaaatgtgctgctggcagtccaagcacctggcatgtccacagcttgcaaaaatgtcctaagattatgttaggcttgggagcatgtgattaataaaatgaaggcacttgcctagcagctgaaaatgttgatatcttgaaaacaaagataaccatcactcctgattatatgattgttccttctctctcgtatgtttgcaattgttttctgtatagtacatgcatgtagaaattagagttggcagggagggcaagtttttcaaacctcagcttaaatgtggatgtattcttttgcctaccgaaatcctgccttgtgttaactatgaattaacctactttttcttaaaattgtggattccccagcccaaaaaagttagataatctgtttctcttaagatttcccaggaaataagattgaaatatggaatatctaatttcagtcattttaatgacaaacatatatggcatacacaagcaattagatcaactaatgaaattgaaatcattttctaaaaatcacttccctaccctcaaaaaaaaaaaccccaaacttgaattcactttagattttaacaatttagttgtcatatatttaaaaatgtttgatcgtttcccaaatttgtagtttaaaattccatatttatatttttaaccactagtctaagaggcactactgcataaaacctgtagaattcgaacagtttattctgtaggtttacttagacaacttttcatttgttcattattttgatgacacagtgatattttaagtacagttatatgctgcacaacatttcagttgatgatgaaccacatatatgacggtggacccataagatgatgatatcatatttttactgtaccttttctgtgttgagatacacacttatcattgtgtgacaaatgcctacagtattcagtacagtaacatgctgtacaggtttgtagcctaggagcaacaggctataccacacaaactagctgtgtagtgggctataccatctaggtttgtgtaagaacactctaggatgtttgtacaacaatgaaatcgcctaatggtgcatctgtcagaatgtattcctgtcattaggtgacacaagactgtaccattgccatgctatatttgctcattgcattacatcttgttattttttcacatttataattgcactgtgaacagaggagagggcaatgaaggaaattgtcttactgcctgggtcctgctttacttttcccctcagcaaccttcatccatccttcagatactcacagtaatttacaaaggaacagaggttcttctggagtaagacagaaaggcaatgtgaggtcaattgaaatctagatctaacagaacatgcttcttcctcttttgttgcctgacataattctacacattcatcaagccccagctcaagtgtcacttcctctgtgaagttttccttcttgttgctcccttagaattttggtttgtgtttactagtgaatcatcaatatccccttctgaattgtaacgtctcaagacctagggatctgtctcaactatctttctatcaccagtgtctggcgaagggtctgatatagagtaggtgccccaaaattcttactcaaagtactgattaaaagcagagtttgattgaagtaaatccacaaaaactcaatcaagcaaacatttaccgtgtacctactgtgtaccagggactaaaagagatatgaaagttgcaaggatggatatgatactgtttttcccttgagatttcctctgtctggcaaggagcacacacagtaaaaccatagttagagtgaaagagctgagttgtccatgagagcaagctcagaggaagggcatggcccctcaacatgagggccaggaaagcctacccagagaagaccaggagaggaattggaaatgatttatatttggagtgcactttaatatcaaagttcaaatttacaccatctccacttgttcagggtaaggctggaaagcaattgctgtaagagagcactgacatatgagacctgaagagggactctcaggttgtcctgtcggtcgttccagcctctgagtatgaggcgaggagggtggggacaagaggtgaatgtaagagagggacatcccaaaagtgattctcatttttttaccttggtcagaggcaggcttctggctgtccctctgattcaatattggctgctgtcttggctaggttaacgaatgttctagttagagaggcttctgccagccccaaatcatgtgctattcggaatgaaggggagggatgtgtagaaagaattctaaaacaaaaccatttttcctgtttttattctcacaacctgtaataagagtaaaatactctgagaccgtgtaacagaagaggaaggaaacatgtggtataaaatttgataaattgatcaagataattctagagtaggacttccgaatcatttaagtgcacatatgcccttaagattactgaaattttaaaactaatattgcatgacaaacatcttatgtttagggcattttagaatttaaagtttcacttgcatccttaaaatcattctacgcaacacaaggaaaatcggaatatttttaaatgagagtggaacatatttatatgagtacattttatttaatgaagaaagaggaactacaagtttcagtagtgctacacaactattttgctttctccattccaaatatttttccagttgccttaagtactaacctctgattgctgacatgtttttcctttcaaacagtaattcaggtatctattttgcatagaacagaagacccatgatcaaaaataacatttataatcttctgattttgagagcaaaatggttctgcatgttttcactacatactttgttttctgttgcatagattttctccacaaattcctgaattttcagaattaacaaattcaaatatttacaattatttttatattttatttttataatgtaagatcaaaaggaacttattcaagccaaaaatgaccaatacggaatcctttgaaaggatggattgattaatcaaaaattctatccaccttgcctcaatttcccacttaagctctcgaatctcccctgggcacttaaagcacactcctcttccaaatatagagtgcttgtaatgtctgtgtttcttacagctgaagactgcaggtgaaagtaatgaaaaatcaagttttttatgtttactttaagaaattaatgaaaaataattttatcatagctgccttattatcactacttaaattttattgagggtgtattatatgcaagacactttagcaggaaaagtatatcctctcattatccagaaatgctatctgctggccttccactatttttaaaaactattcttgttctttagctttgaaaaagttaaattgtcaatatttgaaaactctcagtggactatgtgagatcattcaaagataattgccacaggttgatatttaatggcatgagtttagttttaattctcaaatcttaaattcttagagagtcaagtatctaaaaactgctggttattaacaaaaagatggatgtttaccataatcattttctatagcattttctatagcacctgcctataaaagaacattctgcaatgctaaaacaatacatagattcatttaatcttgttgtcttcctcattttgataatgtacctgtaaacagagttgatttgctatatttggaataattcagataagttttgcccaaatataaggagtgaatgtgatgacctttaggttttttaggatgttttcctgacttcatgaattctcacatcaatgcattttattttctgcaccaaattatcgcagatgcatctactacgattcaccccacaatatgccccagctctagaggttgaaacattctttctaaacaatactctcctgatatcaggagaaatagagaaaaatagttcccgaatattggttctcctatttgcaaactatcaaataatgtccttccaattccaacagccttttagccttcagaggtttctttcattaaataatgttacttatgttatacagcccatttccttttttatcagagtcaggctgaaagttcatttttctgcaaaactgcagtgcccattcttaatttttgttttgagaaataactgttgtaccctctttattatcacaagattaataatatttctttattttattgctcctcttacatttggatcttttattatgagctgtcaaaaattcttttgggaagtagttggggtataaataataaatcgataaaagaattcatgattaaagacaagatagaatccattattctgttaacatatcagtagtgaataacaaaaggctacattgacaattagcatgcaatatattgctttatataattatacatccatatatttgccactttgatttttaattcactggtaaatttaggggatactcatttatggagttaatattaccaaaaagagtttttaaactgagcgaggctttaattagaatggtaaaatattgcttcagggcaacaatgagaatgtaacaagaaaactgactgatcagtcatgggtaactcgaatagcaaacaagtagagaagactcacaaaaccactgaaagttatatacacactcaagttgtgagtcattcaaactgggtattcatacacatgtatacaaatacaaacaagtgtgtgcgcacacaccctttccaatatacacacctgaatataaaactaaataagcagattcctctgttaacaattttattactctattttaggctggggctgaacttttgaagctgatgagcaaaatagtttcccataaaagataatttcatttgccaaaatgaaactactttccgttattaatgttgcaatgaaatggtttgaaatatgagtctgtgatctggacagaaaggatgctcctgttcccagctccaagagggagttctctaaacaattacacccacggagagcgctgtaaggttgtattttcatcaccggccagctgagctgtgtgcctgtcatactcccagtctcccctccagtgacagccgcattgacaacatgttatactccacattgattttacagttaaggagctgattgtgatatatagagattttaagaattcagctgagaggctgacttttgccttttatcattccattaaaattttataaccatctttttcatgtcatttcatccatgaattcttactttagaaagtgatagctactgctgtgagcataacttttctcatgttcagagctttttattgtattagcaaactaccccaattatagttattactcatgttttacataattgtggtggccctttcaaccatgcagttgcaggccagttgatttgtatatagaattagatgattcggcttatcattttaaagcactaaattgaaagagtgccaggagtcaggttttaacacttccctagccaaaggagctaattaagctgctttcagcttcctctccagaatcacacaagttaaaggacccttctgcaacaagagcagcgaatctactcagccagagcaggaagctaataaaatgtatgctggcttttaagggggaaacaaatcatgaaattgaaattgaacacctctcctttcccaagataagagatcatctttaagaaaaggctgtgtattgtgggggtttgaagtgcaagttcatctcattatcatggatgtttcacccataatactatcatcatatgcaggagaaataaaagccttatcccccaatcacagagaacaaactgcatcattgttgtttcttttccctgaagatgctcacagtttgatagttcacatatgaggaataattatgcaagacccagatgaaaaccctaataaaaaatattctgatttttaagtgtatattactctctttggggaagagagggtgagataaggttagacattaaagacttgaatctccaccattgattttacgaaacccaatctcaggggatttgggggtttttttagatttcaaaacaacattgatatcttacaagactcgtacttgcttttctctgggaaatagccaaatctagatgacaagcataaataagaaaggagctgtatccccattttgatataataattgctactgctactgtataccagagagcaaaagtaagaaatggcatagtggttttaagaaagctttaaaatgaaagctaacaagagactgaaacggaaagtgtgatttataccatgactgctggttttagggttttttttagggatttctcttcaaataggatacattaccaaattgtcagaaatagcttgatttcagagttagtgcactataacatcttttgcttcgaaaagtgattatgattctaccatcagtccagttggtgacaaatacgtggatcctgttgtgtgaaagtgtactcatataaccaactattattgcagtcactggccctgcaaagcagtggttgcatttaaaatttcaaccttctttgtaacactgaatcgcatacacacactcacaagatcaacgctgttttaaacaattactaaatccaagtatatcttttttaaagattttcaataaaatctaatgttcacagaaaaatctcataaatgtcaaaattgctgtgggcagaaaaggggggatacagtattttcttgatctgttttagcaatttatagatttcaggccgtggtttataagaatgctaaatgttctggaattacagctgttactgatcagtgattgagccagatttgtgttattgcaccatgttcttgcttgtacctagagagcagtaaagcctcaatataataaaaagcacctgcattttaaatgaaatttcaattgaaaaacttaacagcccttcaaattgcagaatttaacgcagcccagtaaagcttaaataacactttgcccccgcaggctgaggggtttgcattcaaggtgacttgattgtgtcgcatggtgaaattatttacaattaaggaatttctctggagggctgcagaatatttgctgttccacaacacctatgcaggcatatggtgggcctttttcagtattcatggagcctcctgaacctttatgataattgaatcagttagagtgctgagtggagcaagcataaaacctgttaacctaaaggtcagatctgtgcattgtttatttatcagtaggtgaaagagctaaatcggcagcttctgtcacagccacagtaaaaaatcgcctataatattaacagggagtagataaattgcaaaacatggattagaatgataaacagaaccaagtataatatagaatatataatgagagatgctgaaggattttactgggctgtaaaatatgcaagtttgttatgatagtgttattgattataattagttactggggctctagaaaaaaatgtaggggaagctagaactttagtaacaactaccctcttgtatgtttattaaatttatttttttaaatcctcattttttaaccaatggcttgaataaaaagacatgattttgataaagctgtcttagagaggaaaatgatcattttagtttcataatattcaacaagtatttcacacgcaaaatttatgagcaaagcaatcacagtccttgtctttatggcacttatttatttacttattggcctttaccaagtgttcattttcatatccttgtagcagagctatcactcattttagctttgaggagaggtgggacatttccaagaggtctgactttctggatttattttactttacagaacctggacctgtagttcctccgattcttctggatgtgaagtcaagaatgatgttggtcacctggcagcatcctagaaaatccaatggggttattacccattataacatttatctacatggccgtctatacttgagaactcctggaaatgtcactaattgcacagtgatgcatttacacccatacactgcctataagtttcaggtagaagcctgcacttcaaaaggatgttccctttcaccagagtcccagactgtatggacactcccaggggcaccggaagggatcccaagtccagagctgttctctgatactccaacatctgtgattatatcttggcaaccccctacccaccccaatggcttggtggagaatttcacaattgagagaagagtcaaaggaaaggaagaagttactaccctggtgactctcccgaggagtcattccatgaggtttattgacaagacttctgctcttagcccatggacaaaatatgaatatcgggtactgatgagcactcttcatggaggcacaaacagcagtgcttgggtagaagttaccacaagaccctcacgacctgctggggtgcagccacctgtggtgacagtgctggaacccgatgcagtccaggtaagatactgactattctctctcctttgcagacttaggaatgtaccctggattgactctgtgttgaacagagccatctactgactaaacaaacgcatttgttgttttaggcattcactggagaaactgggttttggcctttggcccaaactatcttaaattcgatgtcagtttttcatttatccctgtatccccttaattatattgttgagatgcttccatttgcctcgcacacctgaaatattttgaatgccacaatgatgcttagcttaaccaccacgtcagatttaaatagatcagaaaatgagaagagatgggaaaataaggaggaatgaattagcatattaacaaaattttccattaccaatagtctggtattttttaataatcaaagaatcaaagtaatggggaaagaaataaaaatagcatattaacgggctatccagaaagtgttcaattattcacctcattctattgggaatgaactctagtggacaggataactaccattgttttggctggcatacaaacttcattcaagggaaattagtgtaaccaaacaggagggagttttgtagcttagaagcctcttttgtgtaaatacacacaggcttccatggattcagtcttgtactactgccaaaagcattggtacagtagcttgctcaccggagcacaaaacaaaggacatttgcataacagcaaagttcatctgctgaaattattacttggatctatgttgtgtgttctctctcccccaccaaaagcaaacactaggtgatgctaaacagtgtaaattgttggagaaatttaatttaacctacaaattaaaagctatttttaaaagtctttgttagttttaatatgaagctggtcaaagcaacacacatttttgatataaatatgtgtatagaattccattcattaaacactaatgggaaattaattttaagtacacgatatacgatgtttattgtatgaactgagcaatgtaaagaattgctcttgattcaaaataaaaacaaaaccaaaaacaaaacccaagcatagagttaataatcattccagaaatgactttttttttcaatcttgggggagttttgtaaaactttggtagcagtaccaatcactatgatgcaacaaaacaaacacagtctctttacaaaggcaacactacataatggacattgttctggattatttcgaataaaaatcttataactaggcgttactgattgtggccgatctgaaaaagagtaagtattttcaggccgggtgcggtggctcacgcctgtaatcccagtactttgggaggccgaggcaggcagatcatgaggtcaggagatcgagaccatcctggccaacacagtgaaaccccgtctctactaaaaatacaaaaaattagccaggcttggtggcgggcacctatagtcccagctactcgggaggctgaggcaggagaatggcgtgaacctgggaggcggagcttgcagtgagccgagattatgccactgcactccagcctgggcgacagagcgagactccatctcaaaagaaaaaaaaaataagtattttcagaggaggaactcagtgtacaattctgcttgattcagcatatataaacaataattaaaagtatcagcttgcctggctttttcttcacatttttaccctcttttgattttgtaatatcatccatgaattaaacaatatacatggcttgtcagcctgctagagaagtttagattagcgtggctagaaagctgaatctcataggcactcacctgaggccacaaggcattggtaaccccaagtcaggaatctcaatgtctctaagaaggtgtctgaaatatatgaacatggtacactagtaatattctaaaaattcacactttttattctcatcttataactaggaaataaaaagttatcaatagaatcagcaggaatattcaactgagtctagtatttaatgctatatactatttaaagagtattaagataacatatctgtccttcagtattattggctcacatgttcagaacgatcttaagactttaccgaagtggacgttctcgtgatatagcttagctggtaaacagaggtatatgacagctaaacaacgacttctctttgtaaaatatgagatttaaaagtccaaattgcaaatagaaaatattttatatgaaataacagaaggatagtcattaatgcattggttaagaaattaattcaactatttatcatagagggttgttccaggtattaggatggatgaaggaaattgacagtaatattaacagcagtaacaataataatttcagttctattgacatttacggaacatcagtacatgagtgaacatctttgtaagtgcctcttttaggcagtagggacacagaagagatcaagatgaagtccctaggctcatggcgattacattttagacagaatgcaaacaaataactatgtaatatacctggaagtaataaggacttgggggagaagaacaaattgagtgtagagaaatatggaatgccagctgatagggtgggggataatacaaggagcagagttggtatttcaccttagtgttactcattttgtgcaatgtggtttttttctccatacaatgccacctgtaagaattacagtccaatagggaaatcaagagagacaacacatacttaggctaactagaaaataaatgcaatgtaacatattagtaagtactaaaagaggtgatatgacttggtataaatatgagccttgagaaaggcaaattggagagcacagcagcatagatgaaataatatgcttaaaatcttatttgattacaagaaaaataaatatataatgtcaaagagttgtgtcacctgaataagtgaaagccatgcacttttatttaatatttaatcacctaagaaaatgtatttcattttataaggttggtaaaaatgctctaccaagacctaaaacagttcaatgaaactatagactaatttcatttatgagtacagattcaaaatttctaaataaaagattaccaaattgaattaagcagtatattaaaagaatgatatacaaggacaaattgatttcattttaaaaatgtaaggatggttcaacatcaaaaaatctatcaacatatgtcttacatcaaccaattaaagtagaaagcccatatggtttttttttatcaatagatgcagaaaaaaaggcatacaattaagaagttatttctaacaaaaagtcaaagtaaaatcagattaggaagaaggtacttaaatgggataaagtcaatgtataaactgctgtactgaagccttgaattgaggattgataagaaataacatgtataaataactaagttgcatgactatgatgcaccaaaaaaaagaaaaaaaaaacttcttttatgataacatcatgagcctgtaaaccttgatgcccctgtccactttttcacaggtgaagcagaataaaatagagtaatcctgcagctgtcagctcctcttatacagtagggtcctcactcagctcagacaggtgaagccaccagccttggcaggtgcgccacaaggaacagtgtcacccagaccacaaacatgtgtagcttccttccctctgctatgtacacttagggtcactcatttatgggtttgataataaagcaaagtaaaagaagttgagtcttaatcatcatcctcattgacttttaaagatgggccaatgtttgatgtctacttaaaataaaccacagacaaaaagtataaaacagaggaaataaaataataatgaaaatatattcactgagttcatgttatgttctagaaattgctttcatttaattcttactacaactgtgtcagatagatgctattgtcattcccattttacagacaggaaaactgagaatgagggattaagtaatctgcataagattacataaggagtaagagttggaattcacacccaggcaatagggttctggagcctatgttcttctctacttctttacactgcaacaaatggaaaaaaagtgcaatcttcctggatggaaggacttaactccataacaagacaatccttccaaagtcaacatataaactgaacatcattcaaatcagaatgccgatgttttttgtttgttttatttcaaactggataaaataattttttattttttattttactttaagttctgggatacatgtacagaacgtgcaggtttcttacataggtatacatgtgccatggtgatttgttgcacctatcaaaccctcatctaggttttaagccctgcatgcattagttatttgtcctaatgctctccctcccgttaccctccaccccttgacaggccccagtgtgtgatgttcccctccctgtgtccatgtgttctcattgttcaactcccacttacgagtgggaacatgtggtgtttggaacatgaggtgtttggttttctgttcctgtgttagtttactgagaatgatggcttcaaggatgaagctggataaaatgattttgaagtataaatagaagactaaatgattgaaaatattatagaaaattgtggaagaataatgaggtggtactttctgtagtatgtaaacttactttaaagccattgagttataataatatggtattggcatgaaaaagacaaatggtcattggaaccaactagagagtttaggtatagataacgagtatttgttgaaatgacttattgtaggtagaatctgcattttatttcattggtaaagaatggtttgctttaaaaaatgataccagcccgaccaactatcaatgtgtacggaaaaaacagatccctttatcatatcatattataaataaattcccataaattaaaaatgttaatgttaaaaaagtaaaaatcttagaaaaaaaggagaatttcatgtaatctaaatgtaggggagcactttctaaagaaaaaaagaaactcagtagcttaaaaaaaaaagatagctatatgtagctagaaacaatctgattgattttctaaggcataaacttcccccccacccaccaaaaaaagttaacatccaaaagatagatctggaaagtacatctgtaacacatactacagacaaatcaatttcaccttaatatgcataggccttctaataatttataatacaagatactttaatagaaaataatttaggtaagaggatatattaggttggtgcaaaagtaattacggtttttaccattaaaaataatgacaaaaaccacaattaatttttcattcatacctcacataaagtcaagggagtgaaaattaattaaagaaacaagtaatattagcaaaaacgaatatcagtaatttcaagagtttgtggaggcacagatcacggataatttcattgtttatgataaagtgaatttccccaactttttaagaaagtagtatatcaataatgattaaaattaaacatgcattttccttttggcatggcaatacttggtaatctttccaatatgaaataaacacaagagcacatattgcatacattttcaaattttatttttagcataaaataatgtcagtaggattaacaaataatttgttttcaaccatgaaaggaatattatgcaaccataaaaaataatagggtgtgtccataatcaattaagtctgaaaagcaagttccagcataagtggtagagaactttttttctgtgaaaagtttttaaaaaataaaagagaaagagagagagacctaggatatgcaggagtatatttgctttgcttgtacgagcatacaaaaagtatggaagaataaacttcagactattaagttttcacctgagtgaaataaaacagagccacaattaatgtttcttgtatttatatatttgtactctttctctgtctgattgaaaaaatacaaatagaatatttgaaattaaaaattaagattaatatttttaaaggaaaggaagacattgtgaaagacaactttatttcaacaaatatttattgcacatcttgttctgtatgaatttttcaggggagtccatcataagaggaattactacactgtacggagtcaaatattcccacatgatctttctttatggtacatttttatcttctattgacaaaatactcttagaattatgcaatcttatgtctacacacgatggcaaggattgtctcatcacattagacatgagggttccgaggcctggagatgttaaatgttttgcctaaagccacaccgctttgagacatttatcatctcttagtccattcttaacccatatatcaatctttataaatgctcttattcatgaagttcttcaaaatagtttgatggagttaaagaagtgaggaagttgcttactatgcttttgggtgttactcttttcaagcctgaagccaatcaactaacctgcatgtctaagtttctgcttaaaatggggaactttgaaggtgccatgattctttttagagagacttttcagggatgtaaaagagctgctgaaagtcaatcgttccttaaacacttaaccggcaatttagccgtcctattttctgaagacttacaataaacagaaaaaatggaaacctgaatcattaagaaccactcaaataaaagaagtcattgtgataggaaagccatctctgaaataaacattttatttccagtgcaaaactataattctatttaaaagttttaatgtaatattattgttttaaagaacacatttcttgcttattcaggccaataacatgttcttttgtctgaatttttagggatgcaacaatatttcataatctttcttatgtacaatggatatacaaaaggtcataggaaattaaacaaactgaaagttttaatctcatatattttgaccacatatacaataataaatgtggtcttaagcatagaaaagaatagaatacaatatttagttaactggctccttaaaattcttggacatgggcagggcgtggtggctcatgcccgtaatcccagtattttgggaggcaaaggcaggtggatcacctgaggtcaggagttcgagaccagcctggccaacatggcagaacccctctctactaaaactacaaaaattagccgggtgtggtagcacacgcgtatactcctagccactcagggggctgaagcaggagaatcgctcgaacccagaaggcagaggttgcagtgggctgaaatcgcaccgctgcactccaggctgggtgacagagtgagacgctgtcttaaaaaaaaagaaaaaacttgaacacattgattaattgattgattgattgattgagatggagtttcactcttgttgcccaggctggagttcaatggtgcaatctctgctcagtgcagcctccgcctccctggttcaagcaactctcctgcctcagcctcccaggtagctgggattacaggcacctgctaccacacccaggtgatttttggtatttttataccttatacaaacattaattcaagatggattaaagacttaaatgttagacctataaccataaaaaccctagaagaaaacctaggcaataccattcaggacataggcatgggcaaggactaagtattaatggtttaaagtgttgccaagctctgacctgaactctcaaagtattctggtctaagaggcaagaaagccgtattcttcagattagtcaggttgaatttagctgtgatagctcttctttttttcatttctgttacaaataccaggaagctctctgagtttgaccttgactcattttccgggtccacagacagcattgcacctccaaaacaaatagcgtcctatatctgtgctacaacctttgctagttttagggtgtttttaaaaatattccccacatccaggcaaatcctctatgtttataaggaacacatctaaaacttctcttcatcccagcctctcttcttagaactctccaaaaagtttttttaagattcacaatgatttcatcccctgtagtataatttggtagatattggcccattgttaattataaattaccaaagtaatcatcaagcaattgtccaactagcatgtggtgagagcccttttgtcaccaattattagtaagaatactctttaaaaaatctcaggtcatagtcttcctggatgaaaccttctccctttgatttaagatagaaaattatggtcagtccttctccattttaatttctatattgctcctctttggtttgcataggggtacaaatgtacatataaatatgtcaccttgtagaaacctgtctcttaaagtttcaaaataactgtatgctagggaaaaaaatataatctaacaaaacatgactctaattactaactgaactccacctctgtgcacatggtactaagtgaatgtagagtttatccctgctatgaagaagcttacaggctgggacatgagatatatatcctggcatttatataaagagcactagaaggtaccaataaaagagatgaaagaggataacatgtaaataaatgatttttgtcatggcctgtgcacattttttaggatctctttccccataagaacatgagtgtgttaccactatgctcctgtagagtttagccagaaaagaaaataaacttcagacattctagaattctactacaaaatgttgttctttcttctgatgctcaagtccacatgttagctaagcacaaacatctttggcttccctttttcaaagctttctatacattccttatccctgagaagaggatgtgctattaatgctttaattgctaagttatatataaataagattcaggaactcaattttgcatcttcggaaaatatgaataatgatttctctttcccttcctccaagaaaaagtgacttatttggcagtcacactaacagtgcaaagaaatgagttctgatgtttcatttagttgagttataaacatgaaaaccatcaaatcctatgcaaccctattgaagcatgtggatgtgtgaattttctccatgtgtttgctctgtgtccttcagaacacccacagtggcgatgaatcgctaaggtgtgtatcagtctgacagtcgtagaaagtggcaagactgaaagccaaacccaggaaacagcatttcatttagctcctggagtactgctaattgatctcaaacccttcattactgtctagtccaaaggcctcaggagaatgtagccatttagaaaatgacttaactgaaaacaagagcaaaattctaggcctcgtgaacttcaattgctctattcctgtatcgtcacactgattctaagtttatctttcatttcaggtcacttggaaacccccactcatccagaacggagacatacttagctatgagattcacatgcctgaccctcacatcactttaaccaatgtgacttccgcagtgttaagtcaaaaagttactcatctgattcctttcactaattattctgtcaccattgttgcttgctcagggggtaatgggtaccttggagggtgcacagagagtttacctacctatgttaccactcaccccaccgtacctcagaatgttggcccattgtctgtgattccactaagtgaatcatatgttgtgatttcttggcaaccaccatccaagccaaatggacctaatttgaggtaagagaaggtgactatgatttttatgttgctgtagtccttatctctctgagaagtagggaaatgaaggaggcttttattcctatatgaacatagaactaatttggcattgaatatcccctgactcataactttcatacactatcatactgtacacttcaacttattatggaaacatcaaagtttatcaatttgaagaactaaaaacccttgaaaccacaatcactattgtctaaggattcgctacataatccatcacttcattttcaacatatgcttttattatatgttaggcaaacctgatgtaggttctatatgatacatttgcacaaatgtacctcagaattctaaggctaacacagtaattctttggcatgttgttagcttatggaaacttgtgaggagtgtggtcagggagcccgatacgatgaaagaaaagagctgtgattcagaaatggttttgcaaccacccaaacttgatacttggccaagaatacaaagttgataatattatcatcgtttataaagtattgatagtcataggaaaccattaacttgataagctttgtgtatttctactttgtgcgaaactggcagtaaagatttggcacatctaacttagaagaaatctaaaatgctatcattctgggagataatagtaaaatgcgaatgtaactgattcttcaaaatattaaatatatggaatttggtccagaaaaaaaaacgttcatctgaaacaaaaccacgtaactgtaaacttaagatgttattctttatgcttccacgcatatatcacacgcacatgccacagaacagcctgagttttggtaatctcaatatgagttgagataatcctgatgttcctgcttgtcttttgctttagatatgagcttctgagacgtaaaatccagcagccacttgcatcaaatcccccagaagatttaaatcggtggcacaatatttattcaggaactcagtggctttatgaagataagggtcttagcaggtgagattacaaaaactataaaaacaaatgctggcatttagttctgggcatgttgaatagttcaaagtatctcagtgtcttcattgtgtgagcgtgttatcagttatgcaataaaacatgtttggttattatctgtggcattaatcacccagctgtaacagtcagcatgtttaatgttttccatcttaactgcatgcttaaaataagccttttgaagttgaacttgtagatgttcaagccttaacctattgcctttgtcacggctccatctagacataaaacgttatggaagaatttggaaatattgaacacatacaaaatggggaaaattcctgggcacttgtagaatgcttgctatttctagaaatggcttataaatgaattataatgacttataattgattgtaagttattgattcagtccgcaaaagaaaacattagtgaacaggattgggacttgaaagaattcaatctagagttcaaagacattcagtaaaggctaataggtgacagtagaaaagggtgctacatgggagagttaggagatctggttctgctttagcctgtgctggagaactagctttgtgactttaggccacaaagcttcactacttaaaaatcacttaacttctctgggcttcatttttgttgtccataaaatgaggtgattttatagaattaaatgacttctaaatcttcatgagttcaagcaatgtgattaaatttcagaaaacatgaacgttattttatgaaaactcctcgatcatatgtttcagtaacttttctatgtgggtcattatttttctagacccaccactgggtagctgtagtctgaaccctgtttaccattctagccttgtctcccatccctttcttaccaaggcctctgcattccagccacatttgtattgcattcagtacctccaacatacaacacttgctctttcagcttttccccatagttgccttttcctgttgcctgactagatcatctgccacgtcttagcctggaggtttcttcctctaggaggcctttcctgccaacactcttgctggtctgattcagctcctctgtaacatttccataggacatcccctaacatatcactattgtcattgtagtgtactggcctgactgcttgtctaaacaccacgttatattatcagatctaccataaggcaggggtgcggtcttcgtgactctgtcttcagttcctagcatggtgtctggcacataccagcacatagtgccctacacctgaatacttaaaaataggttagctcaatcaagaattaattcactgctctgtaccttaggaatattagctgtagtgttcttctctctggggaatggcaaaactaaggaaaattctcctgtcctcttaaaaagttgtggtgggaaaacatcctagttcttgtaagattctcagagagaggcatctcgtaaatctgatcaagcaacagaatgaactatatgaaactgccacttttataggtgaagattggtcaattactagcagatccatgttgcttatcctaaattataatgctcattatactattctcaactacttttaattcattatttacttaatttggcatccctatatgattatcacttcagtagaataaattcatttatttttgcttatttgtgcttactgtgtgctgaggcactgtgataaggaacaaaagataaatacatcttagcccttgacctcaaagaacttataatctagtggaggaacccttccccccgccccctccatagagagtgtgatataatatgtatttttatatattatatacattattaattatatataataatcaatatatattatatatttatatattgattattatatataattaataatatatataattaatatatatattaattgctgtcctcagagttatctacaaagtcaccaattctgcctaaagaaatcacttcaaatagtagcttcctgtgacctatgaactcttaagtgcttaaatataactatttcaaaaaataaatagaacttgactctttaacattactgaatctgagttttagccatgagctactcagcaaaaacaaagaataagtttccaaaagttaattttgtttctttatacaagaaatgaaaacttattaaataattaggaccaaggccatgaagttagttatgaatttttagtgattcctctaaggattcttaatgagaagttcaaatctaagatttcaggaaaaaataaagtgaatttccacaacttaaattgaaacatgaattgacataaacacacccatgacagctgcttccggaagggaagtgtgcagataacaaaattgtgttaaagggatattttgactagtttcataatgccaaatgtcatttttttccggtagtacttgcacagattttttttatttattaaaataacagctacaacttacattaagcttgtagaaaaaaaaaaagcatttcttcttaacattcagtgtaaatggcgtgagtctttataagaatctctttttctagccctctaccctttataagtccataaaaagctaggagtgcctttagcccaagggggagtgtcttgcaaatatgagagaaaaccaaaacttgatcccctggcgggcaggatatttttctctttaaaggaagtgattttgtttggttagatggtgccactggccaccttggcaacatccggggctccttgttcctgctggtcagctagtggtctgtcaaattgcagagggggatgaagctgagtgttcatcatgtgttggttcacccctgtgttactgttccttcatggcccttcctttgcctatatttgttttgctgatttatttgtttggccaggtatgttttcctgggtttttaattgaattctaatatctttgggaggattatgtaatttcctattctccccagattccaccatcccaatttccttcttaacttaacgtctgcataaataaaaggagcactgaagtgtttcttaccatcttgacttgaatatcaccatagttacatttagaatcagcttttaaatggcacttctcctgatataaaaagtaaaattaagattcactagacatctctttatgaatatatttgtgacagtaaatataagttgaagccaatttcctagttcaagtggtctattttggctaagtatgtgtttataacgcatagaaaagcaccaatttaatttaaaacatcattatatttggaacttcagatcattctagtagttattttttcttttatatctacatgtacaaaacagtctcaagtcaattatccagataatttaattctaacaaaaatactttttgctcttatgattatcttaggtaaggagtaatttttgtctaaattgcacagctagttgcctcattatcgaattttgctctgcctgtgtagacacgaattccgtataactacaggtttatactgcttgtcagtttctaacttttcttccttaataattccttgcaaagtgagcaagttatggttgttgggggaactataactttgggtttcctgacattttcatcacttagaaaatctggcgaacgtgctgttatcatctgaagctgccgaagtgagtcaggcagggtttaacaagagggcggcgacctccttcattttaagcatcaatctaccttcacaattttcagcacctaacaacactgccttggttcctaagtgatcagataaaactgctaagaatacaatgagcatgttctccttttcgttgtggatttaaagaagaacaagttataataaacaatagggttattttactattatagagaaaatattgactgtcagattataatttagatttataaattagctttcattaagtttatgaaggaatgtatgttctaattgctattccttttaattatttatacatttctcagagtatttttttttttttttgcaatgacaatttggatggagacctctatgtgattcctcgagaatccactaattgtattacatttaaattaaaacattcaaaattaacacattttcgtcttatttttcaaagaagggtaagacttaagatgtaaatgcttaagctaaatatatcataaattctaagtttaaatcttattgacatatattttcatatatatttttaaatctactaaaataaagatgtttcaagtcctaaaagaggatgccatttctgtgggggataatattcaaaagaacataacttttgttcctcttctttgtaatgagattaaatatgtatagatgacatctgcatctttgctagtatgaaagactgggtcagttccatgacacgtgtttctataatataaataatgtcagattgtagctattaagtgaagaagttaactttgtacatagaaagggcaagtgaaaggaaagcttctcccgtgactaccaagatgagatagatcctgttaatttattccttaatatgggaatgtgaataaaaattgagtctaagaatgaaagccaacttctgtcaacactagtatgccatctcatagccatgcacttaattcaaaaggagtaaacatgtctttcacattcaaattaaattggtcacagtgttttttcccattggatttttttttcaatgccttacatgccctacacgatgtccttttctgtgtcatcatattatgtgttacctccttgtattagcccattttgcaatgctctaaagaaacacctgagactggataatttataaagaaaagtttacttggctcatggttctgcaggctgtacaagaagcctggtgccagcgtcttcctctggtgaaggcttcagggagcttttacccgtggtggaaggtgaaaagggagcaggtatgtcacatggcaagagagggagcaagagggcgctgggaggaatgccatgctcttaaacaaccagctctcccctgagctaatattgtgagggctcactcactaccacagggatgacagcaagccattcataagggattcacccctatgatccaagcacatcccattagggcctacattcaacattggtgatcacatttcaacataagatttggaggggacaaatatccaaactatatcactcatgaaaaatgaacttctaaatccagaaggatgtgttttgtcacaggaggtttttttcccctagtgttttcttagaataaaaaagcagaaaaactactttcattggctgtatttctttctcatggtgatgacaaagtagaacaaagatggaaattactgcaaaattatcttaggtctgacaattctggtagtgtagatatagatagcaacagaaacataacagcttcaagtttcactcacaatctaaaatgtctcatattaaaaatattcaagtgtgatcaacattactcttcaatttttgaagcaaaaatcttcaatactatttttagaatcaacaaatagattttttaaagtgtctaccatcagctgaaaattttaatagctatagacttaagcaatggaaacaatattgcatttcatttttctttgtttgctattcccacaaaagatttgaagatgtaaggaaaagtatgatttatgagatttctcaaatccacacttgtgtgatggtgtactgaaaaatactttgggttgtggcagagatgaggaagagttagtggaagaagcaactaaataacctgcattttcagaagcgtgatttatattggtgacaatattaacacatgaattctgttaggacatcaataaagttgacacatttttaattctgatgaaaataaccccaggcattctgcagctgccctgaagaattttggtttcccacaatatatcagtcccttccaagatacaagccttcacatattttgccctggacaaatgtcttcactggataaaataccacttcttatcaaaacctgccccaaatgttacctcctccgtgaagacttcccagctggatatggttaaattagatgcttcatctgatgcgtgttcaaagaataaggaataaatgaataaattagatgttctcatttaaaaacatatttctgtaaaattttatatacattatggctccaggtggacagataacaattttattatttttaacacctggcatattggtaatatccaataaatattaaatgaatgaacaaatgaatgagtgaagtgatgtattaaatatgaaaaagcaatataatttgttttcaatatatttttaaaagcactttgctaagtttcagcagagatattctttctattggacaggtagatttttatctcactaacctaaaaaattatataagtgacctgaaatttttgagactgagtgcttaaataactatgaaacatctattcattcatttataaaattatctattcagtaaataaacaaattaaaactgcatcatttaaacataatctagttttctaattcattggagtaataacacctgaaccttgaaatgaatattgttccacaagtaagattttaacacatattattttttatgaggaaaattaccatagtcatgtctataccataataaagtttacaatttgctgtttggggagtggaggagggagagaccggaggatggtctcaagcaaatgggggaaaaactattgtaatagtccaagtattcctaaatggacccaaaaacaattggttttactggctacatcatagactcaatataagtattcacttactttgaatacttatattgcaaaagttttttcctacagagtttaaaatggacatttttcaagacatgcctagagaacacactttgtatttagagaagaaattgattgatacacataagttttgtcataagtatatgatgttaattgatctagcatttttgttttaaaatgtattcttttatcatttattaaatggaatgtcccatttaatatcaacaatcaacacgtaagtccatttgaaaaacagtatacatagagtgaatggaaaaccacttcaagccaactaatacattctttttttgatatgaagtggtgaaatgtgaatcaacatatatatgtagacaagccataggtatatattcttactaaatacagattggaattcagatgaaatgaaaacagtatattttagtatttaagaggattcaggatcttgtttcctcggccaggcgcggtgactcacgcctgtacagaatcccagcagtgggaggccgaggtgggtggatcatgaggtcagaagatcgagaccatcctggctaacacgatgaaaccccgtctctactaaaaaaaaaaaaaaaaaagctaggagtggtggctgacacctgtagtcccagttactctcaaggctgaggcaggagaatggcgtgaacccgggaggcggagtttgcagtgagctgagatcgcgccactgcactccagcctgggcacagagcgagactccgtctcaaaaaaataaataaataaaaaaaaaataaaaaataaaaaaaaaatcttgtttccttaaaaatttaacttaacaatgaaagttaaagtacaaaagacaaatgtacggcctcaaatgaaatatctactgatttctcaattaaatttttaaaaagtggaaatagtgtaatattggaaatgaataaaccctatgtccagctaccccattaactagttgtgcaaacttacacaaatccacttgtttctcagggtctcagggttttttgtttaatctgtatgatgtagcacacactttattatttgtagcagataaactctaaagccatctcttactctaaaattttagaaccaccttgaaaacaggcatgcaattgtgtgtatctatgtggcctgagttttgtagacgtaaattgtgtatttcgccataactaaattattgtgaaatctcttaaagtattataaaaactaaagccctatagaatttatttacaatcaaccattttagcgccacctgatattgttaattccacatgtaggaaagaaccacaaacatggtatcactttaaatccataaagattattaattgtataatagcatagacatgtggaagaaaaatttacatattataggagaggaggctaggtatccagactctagctacatttcttttaagtcattttatgaagtaaaatataattataagtattttacccagggagagagctaatgaagccaaggtcgctggttcaattcccttgtgagccattagcttcatttcattccattgtcataggcttgctaccctcttaaccccgactcatcatccttcatattcatactattggttgcaaaggaaatttggccagactgtttgaatgtgtaagcaaaaatctattccctctgctagaaaaataacgcaaagttcaagccttagtgatatgacatcatccaagtatggacagaacagattatcattatgattgttattattactattattattatcatcactattatgttggcagtatagcatcatggttaaaagagcaggctctgaaatcagactgcctatatttgaatctcagtcctcctacttattatctcaatgacttggacaagttatttatctctctgagccttgtttttcttattttcaaaataggtattataatagcaccttatagagttttgtgaggaatgaatgggttaacatctgtagaaaatgcctgacagctattaagtaactattattattttttagttgtctggattatgtggactattcagcacttgctaaaaagcatatgtattcattttccagggctgcagtaacaaaatatcacatactgggtggcttgaaacaacagaaatttattctctcacaggtctggatataagaagttgcaaaccagtttgtattctggaccagactcccttccaaagctctgtagaagaaccctttcttgcctcttccaacttctggtagccctaggaaatccttggcttgtgacagcataactccaatttctgtttctgtttttacatggccatcacctccctgtgtgtatccatgtgtctataaaatttctctctcttttttcttccaaagacatcagcattgaatttatggtgctgcctaatccagtatgacctcatcttaacttgattacatctgcaaaaaccctatcttccaataaggtcgtgttcacagggaccaggggcttgggcttgaaaatatctttttgaaagatacagttcaacccactacagcagacaaagcagaaataaaagaggcattaaacacctgagaagagatggtaaagcagggaggtgtagaagatctgatgcaagcacatatttaggagaaatagataaatagcctcaaaaagtcactaagttttacctgtaattacaatagagcaacacctttcaatgtgggtcaggcagaaacctgcaaacgtatcttcgggctatgaataagaaacaggatgagtcaagcagatttcttctacctaggtggcagtaaaatgctctgaggatcctgatataattttggtcaaattatttaacacaatcctgcaaatggcacctacccacccatgccacaccacctttgcatcgtcaaatcagagattgtgacatattgagacaaatactgtgggccttacactggagatgaggtatccttgatcatctaataaacccaaattaggtaatgatctgaggccagtgtttgccctgtgtcctggatgcctctgggatggtcgtgtgttgcactacatgtttaagcaagtatctcagtctaagctattgtccactcatagactgactgtgtctgtttatggcatttccttacacaggtagttctgaaccaagcaaaggaagcctgatggtcttctgcccaaaactggttaaaaaaaaatggtggctttactctatagtcaatttaataaatgacttggaaagtcctcctcatatcacatcagcatgtcagtttttgccttctgcaaagtaatattcggtttccactgtattgactcaagtaaatatgttcacactatggcaaaatacagctcactgtagcaaaactctcagcgggagaatgttgtacactttggtcacagttacaatttaatttaggggtttatctgtctgcagtgagattatgggaaagaagcataggtatcggaagaaaatgttgatgagggattctgatatttgaaaatggatgagtttccaaaaagaagagcataaaactctctggatcaaattcagatagaaagctggcaggttgcctgatttgtaattgcatcttgaattgagctgtaatcctcaccacttctgaaaacaataagaataagaaaatgataaaccacatttgttttcaatagcaatatttgttcagcattcctaataaaatatttccctgatgttttggtttatgctggcaagtcacaaaattaatgatatgtgttgtgtaaggagggaaaataaaataatgtattttctagggaggaaaagaaaacagtattttgtagaggggtggaaggaaatcctgtattttgtgaagaaaaaaagaaattatttgttagattttctgtaaagtagaaattcatatactttttttaacaaaacaacattttaggtttacaacctatgaatatatgctcttcgtacacaacagtgtgggttttacaccgagccgagaagtgactgtgacaacgttagctggtcttccagagagaggagccaatctcactgcgagtgtccttaaccacacagccatcgacgtgaggtgggctaaaccaagtaagtaagcttctcatacctgtgttaacactttgtgtatttttaaaagcatattctttctttactatgaacctcccccatgtacacatcattttgatagtgaagtgttactggtaaatttttaccaattgcagattgacagggctgtcattgaaaactttagaagggccatttttattagtacccaaataaattagaaatggacacattaaaactaaaaccctggggcccctgtgccattcttaagatgcaaactctctcctactttgacattgttcttgggcctcctgctctccctctgtcatttcctttgcatgaacaacgtaatttctatcataccaggcaattgtgatagacatgtccatgtattaattggatacaatgtactattgttcaccttccttcagagagctctgccctaatatcttgtaactcgtcgctcattagcaagaaccatttaattggattgcaataatggaacagattcttcccagtggatcatcttcagactggctatgggcagaattccagcttgatccagtaaaaggaagcctagacatcaccactggatccacttaaataatgcagggtcgaccctggacctgctgggaacacttttttaacaggcatttggaagagttcacagagtaatctaatctgttcctgcaacgttagaaaccacagtaactgaaatttcacagttacttggtcagtagggtagtattaacatgttaatttgttgtgatctgttaatttgtgtcaatccctgacgactatcaggaaaaaaaccctgaatctaccatgagaatatgtattaaaatcagtcttataggtataacttgagatctggcaaatagtttcatcaaaacttgtcagaataacaccaaatattgagaaatacctgatcaggaaagacccactcaaaacattttatttatgaaagaacactctgctcactggggtaatcatctattgatgatataaaaagatgaaaagtcactactggttgggcaatgtaaccatgtgattttggttacactggatcagccttgaatttggttacagcttaagaagagagatgctccatttaggacacctgagtgatatcaattgtgaattaaagccagaattgaggatatcaattgtgaattaaagccagaattgaggatatcaattataaattaaatcagtaggttaggtttatctgtgtttccacaaaataatccatctttacaaaagaaaactgtctttctctggtttttataaggctgcaggtttctaatgatctgtgacacttgtattgggatctcttaaaccattttaatggaataatataagttaattgatgcttatggctaccctctgaaacacctctgggaaaaatacaaagtttttatctggggatgtgttttaaggcatatttccattcatctccctcttgctctctactccacctcactaactgattcatcttaaaagcctactcataaaggtaggctctcccccctcatctgacatttgaatacttctgttaagatccggctggtgaatttccaccaatataggtcctttatgttataattgcattcctgaagtaactgtgcttataaaaactgacaaacctaatagatctgaagcagctcactgaagtttcattaccttggtaatctgaacctctgaccttcgggatgtaggtaatgcaatctgctgttatttccattcataccttggaaatttttcagataactatttgtgagcacaaaggttaactctcagaagagggtcagtcttgcgaaagcttgttgcattatcattttcttcttttgggcaacttgctatcttaagtaaattaactagtcgatcctctgtgaaaggtggcctattttttgcaattttaattttaaattgttgtcttgattggataggaaaaacatggcatacagtctaatatgctcaaaggcaacaaactatagattgaaaatactttgcagtggaaaatcatgttttaaatttataaatatttgcttattaaaaatcaccttccaatgtatatatatatattttaaagcatggtctttgtctattatgaccctccccatgtacacatcattttggtagcaaaatgtttctggtaaatttttatcaatcacagattgatatgtataagttattaaaaacttttgaagggccagttttaaacattagtatcacatacatgatatgtgagataaaagcgtccctgtgttacttcagttcatttttggaaggcagatgttgcaaattggcaacacagtggccatatttccttcctcctccagcttccatacactgttttgcccacagtatttgaaaaaataatatttgcaaacatttaagaattatacataaagataatttgaggattcacttgacaagtcaaatgatggggtgaaacaatacccacatttctggaaggaaactatcagctggaactggcttcccctttagacagatcatgccctaaaaatctgacccggtccccattttcctggtcccaatagacaggtgatgtttatccctgctttatatgataatacaaaatattttgccctaaacaaaatacaccaaagataaattatattgtaattttgaaaaatcacagtttttgtatttgaaaaatacctcacttaaattatttatacaatcctcagaaaagcacaatgagatagaaaccagcccatagtaacttaccaaaaattatagaaagtaccagttcccaaactcaaacttaggactcaggcatcaaattttctatttctcatgcgtttagacttaacagtcattaacactttaacaagaaggatttaaaaggatccttctcatcttgactgctcagtctaaaatagaaggcaaaataagaaaatgcctaccaaagggagtacagtggagagatagtgcctcctttgaagctgattcactaaggaagtcagttgtggccagaaaagagcagtaaaacactggagggagtgagagggcaatgctttgtaaaagaggaaatgaaaaatcatcaaaatattgtctactttactgtctgtcaagagctcaccccaaccttcagatgttcatatcttgtatcatataatcctcctggtcttgctctctccttcctctttttttccatcttccttctttctctatttccttttttaaaatgtttttgtagagacaggttctccctatgcttaggttagtctcgaattaatgggctcaagtgatcctctctccttggcctcctaaagtgctggaattacagccataagggaccatgcctggccatttgtctatttctcttcttctaccctctctctctctctctctttcttcctattttccttccttcctcacagatacatttatcactttctctgtcctgagcactcagtgaactctggaaaatgcataaagtatgagggtatcatcattaagagggcaagtttaaaaccacagaaaaagcatttgtctcatcctgatctcttaatcagaaactaccaggtttgatagctagaagtatatctgactttgcctgaatttatctgattaaggtggcaatatctgtaaataattccaaatctcatctcttctaaaaagcacctaccattgttgcctcaccttgttcctctgttctcttttccatcactttagttatcaaatagaagagaccacatctgacttttccattgtcttccttctcagtcacttgtgcacctgttgtaatctgtctctcttcacttgtactctacatggttttcttaaagtcattagttatcacctaatgacccatttcaaaactctcttctcaatgccatcctactgtgttcctcttgtatccagcactgtgaatgatcccttactgactataattcttccccaataatcattactcccctcttctcaccaactacttcttctcatccctaaagatgtttctcaaagttctttcctgagtcttcctatcatactcctgttctcttgttggtgattccatctatactcaaggtttcaaattcttctaattacaaaaatgacaaccgccaacattgtatgcagccatatgaataaatagttttaaaatagactttgggatcagggatacttaaatttgaatcccagttccaatatgttttggcactacgacctagaatttaacctgagttccagttttctaatcagaaatatgaagataataactgccctgaaatctgttaaggactaaatgaaataatatatgtttaacaattagtaatcacctagtatttgtaatacagagtattattctatttctaaaatgtgcatggtcctttcaataccattttatataatatataaaaggggaagccatgtctagtaaaagcttggaagttgattttgcaagactattcagataaaagcattttttttattattattatactttaagttctagggtacatctgcacaacgtgcaggtttgttacatatgtaaacatgtgccatgttggtgtgctgcacccattaactcgtcatttacattaggtatatctcctaatgctatccctccccactccccccaccccacgacaggccccggtgtgtgatgttccccttcctgtgtcctagtgttctcattgttcaattcccaactatgagtgagaacatgcggtgtttggttttttgtccttgctatagtttgctgagaatgatggtttccagcttcatccatgtccctacaaaggagataaaagcatttctacagtgagttgaagatgcataaagaatatatgttattttataattacctgacttggctaaaagatagaaatttaaaaatctagttaaaatgttgaaaacttagtctgggttccatggctcatgcctgtaatcccagcactttgggaggccgaggtgggcggataatgaggtcaggagatcgagaccatcctggccaacatggtgaaactccgtctctactaaaaatacaaaaattggccaggtgtggtggtgcatgcctgtagtcccagctagtcgggagactgaggcaggagactcgcttgtacccgggaggcggaggttgcagtgagccgagatcgtgccactgcactccagcctggtgacagagtgagactctgtctcaaaaaaaaaaaaaaaaaaaagcgaaaactactaactattgcatggcatccattctcctctttttcttttagtgatagccttgccccttatctagaaactgcatttactaacctcccttgcaattagtcatggccaggtgaaataccagtagtatgtgtttgtgtcaatagaaagtgaaagacaatctgcatctttttgggtattaaccagaaaacactgggtgtgtgcctacttgttctcttttagcccttcccctggactggaatgaggacatgatcatgttctcaggttcaactatgcagtcgtgtacaacacccaaagagatccaaaatccccataagagaaagttcctgggttcttaagtgaccacatggagcacagtctgttttgatcactttgaagctattacatgagatacaaattaacatggattttatttaaactattatattttggagattttaggtttcaccagcttcgctaactaactcattccctgtttgcccatatcaatttaccttaaaagtagaaattagctatcctgttttttaactaaatataaaatgatgaataattaatatatctattatactatctcctttaaatacagttttctctggcaggcccctgatagaagctggaacactatgagagactaaagtagctctggagtttccaaagtgcaggtgtttggttttgacagatgggtaaactagagacaagacaggagatatgctgctcggaaaactaaggaggctgacttgaaggattattgcccaagaagttaatctttccacttcatgtcagcagtagtaccctcaggcagagtaaagaattttctcaagagcagttttgacaagctcaaattttccaagagctgcttagttggtgacgcagagccctgcaccatagaacttggaaaattggactctaatttggagattctgcgagcaagatcaagacttccatcataaaatcagcttaataaggtccttccaggtttttacatttgagcaacattacctcccaaaatgagcctgctaatgtgagatgtctgaagaatttagtcctagacaaataaattaagagatctaataaatgaaatgatttactataattgatctgaatcagtacaacaaactttttttgtaaagtgtcaaatatgtataatgttagactttgaagcccatacagtctctgtcttaactcaaatttgccactggagcacataaacagcaataaggtgattctgatttttaaataagcatggccatgttccaataaaactttattttggacattgagatttgattttcatatattaggttggcacaaaagtaattgtggttttcgccattgaagtaatggcaaaaaccacaactactttgcgccaacctaataattctcacatgtcatgaaatactttttttcttttgtttttttcccccaatcaaataaatgtacaaaccattcttagcttgcagggggtgggccacactaggccaacaggccagatttagctcatggaacatagcttgctgacctctaatgtagatgttaaaaatctagaagacataattgacattgataattgtcttggtctgtttgtgttgttataacagaatacctgaggctgggaagtcaataaggaaaagagttttgcttagctcatgattctgcagactgtacaagaagcatggctgtagtatttacttggtttctggtgagggcttttgtgatgcattaaacatgacagagaaggtcaaaaggtgagtggacatgtgcaaagatgcaaaatccaagggatgcccggctttctaaaaacccactcttgagggaactaattcatttcttcaaaaactaacccagccttgccagagcaagacaccaagccattcatgagaatctggccccatgcaacaaacacctccaactaggcctcatcttccaaaactagtacactggaggtcacatgaggtttggtggtgatataaacccttgatccccctttgctgggaaccatggcaataatttaaggccatgtaagaagcacaatctacttgctgttgcaggataacttttaactagcccgtctgttatggactaaagccctaattctcagtgtagctgtatttggagacggggcctctaaagaaatacagtcatcccttggtatatgcaggcgattggttccaggactgccccctaagtacaccaaagctgtgcatactcaagtccagcagtcagccgtgcagaatccatgtatatgaaaagttggccttctacacgagttttgcatgggagaatactactttattttttttggagatggagtctcattctgtcactcaggctggagtgcagtggtgtgatctcggctcactgcaacctccacctcctgtgttcaagcaattctcctgcctcagcctcccaagtagctgggactacaggcacatcccaccacgcctggctgattttttgtatttttagtagagacggggtttcactgtgttagccaggaaggtctcaatctcctgacttcgtgatcctcccgcctcggccttccaaagtgctgggattacaggctagagccaccatgccagctgagaatactatattttcaattcttgtttggttgaaaaaagtccctttataaatggacccaagcagttcacacctgtgttattgtgttgttcaagggtcaaccgtaattaaggttaaatgagattataagagtgggacctcgatttcataagttagcacacaggctcgcttgctctttctctctgtctctcccccaaccccttctctccctttctccgatcacagaggaaaagcatgggaaaactcagcagctagaaagtagctctccaaaagccagggaaagagccctcagcagaaactaaatttgctggcgccttgatcacgaacctctagcctccagattgtgagaaataagtttctgttgttcaagccacccagcctttaatattttgttaaggcagcccgagcaaactaatacatatctaactactgttaaaattatttaggaattcattataaaggagaggagcctgttctatatttgagaatttgctccagctaagataaaatttctgaccaaggattggaggttgcaactaaaaataacatttaatagcaaagctcttatccaaaaaggttacaacctttttcagctcactgagattgtaatagtctgttctcacattgctataaagaaatatgcaagactgagtaatttataaaggaaaaaggtttaattgacccacagttctgcatggctggaaaggcctcaggaaacttacgatcatggcagaaggtgaagagacgacatgcgagataggtgagagagagaatgcacacataggaggaactgtcaaacacttatgaaaccatcagatcttgcgagaactcactatcatgagaacagcgtgggggaaaccacccccgtaatccaatcacctcccaccaggtcctgcccttgacacatgggtattatggagattacaatttaagatgagatttgggtggggacatgggacctaaccatatcagagattaacttgatattcccacaagtagggcaatacctgctcagataaatttatgtggtccacaaaatatgcatcatacataataggattagaatatctgagaaaatatatcccaatatacacatatttaacataatctcacaggaaatcccgatttctttctattgcatcaaatacaagcaagtacaagccttaactccatattgtataactgtaactcaaacattcacattgtagtttttaagttcacctagttgccacagaaacacttgaaagataacaaaatcctaagctccaacaaccatctgagtggatccccacttggccaaggggacaccagagcaaccttgaaaactgagttcttggctacagtgggatgggaagtcagacacccctccctggctatacaccattagggttacttccctaagtgctaagcagaaaccaccctttcaaaagattccaccactgatatcaaccaaccacctgatgctgcccctcttctactaactgatgagagacctctggccacagagttgtcatggccagtgtatggagaatctgcagtcagggtcttcatgtcctcttcttcactgcttgatgtcagagggctgaaaactccaccctcagattgtgctaatgctgccatttttgtacgtgggatgcaccaggggatgtaaaactcaattgcacatgtgcgtgtttctcctttcataaatactcatgactcttcctgaggcttattgaatatgtatattcagtcaccccactcagcataaattcctgttgctcctcccttgaagaatcttttctggcttctggcttaaggctaccatatgcttcccaggctgtctgaatggccatcctgcaggctgcaaccctttatgagaagtaaagctctccttttcaaatttatgaacctcttctgttgacacacttcaaactcaagaagtctcaaatgaaacaagtttcaaaatctcatcccataattccatgttttctatcttatttaatgggattcacccagaaactaaaaccaaaaatctaagctatagctgtatctcttccttatccctttttaatttgtttatttacttatttgtacacgaataagttctttagtggtgatttttcagattttggtgcacccatcacccaagcagtatacactgtacccaatggttagtcttgtatccgttgcctcccttccacccactcccccgagtgcccaaagtccattgtatcattcttatgcctttgcatccttacagtttagctctcacttatgagtgagaacatatgatgtttggtttttcattcctgagttacttcacttagaataatggtctccagttccatcaaggtttctgcaaatgccattattttgttcctttgaatggctgatacacacacacacacacacacacacacacacacacacacacacacaccaaatttttttatccactcattgattgatgggcgtttgggctggttccatgttttcacaattgtgaactgtgctgctataaacatgcatgtgtaagtatcttttcatataatgacttcttttcctcttggtagatacccaggagtaggattgatgaatcaaatggtaaatctacttttagttctttaaggaatctccacactatttttcatagtggttgtactagtttacgttcccaccaagtgtaaaaatgtgttctttgtatcacatctatgccaaggtctattattttttggttttttgattatggccattcttgcaggagtaagatggtaccatattgtggttttcatttgcatttccctgatcattagtgatgttgagtatttttcatatgttttttggccatttgcacgtttcttggccattcttcttttgagaattgtctattaatgtctttagcccactttttgacttgattgtttgtatttttcttgctaatttgtttgagttgcttgtagattctggatattagtcctttgtcagaagtaaagatttttaagactgtctcccactctgtgggttgtctatttactctgctggttatttcttttgctgtgcagaagctttttagtttaattaagttccaactatttatctttctttttgttgcatttgcttttaggttctttgtcacaaagtctttgcctaaactaatgtctagaaggatttttccaatgttatcttctagaatttttgtggtttcaggttttagatttaagtctttgttccatcttgagttgatttttgtacaaggtgagagatgaggatctagtttcattcttctacatgtggcttgcaaattatgccagcaccatttgttgaataggttgtcctttacccactttatgtttttgtttcttttgtcaaagatcagttggctgtaaatatttggctttatttctgagttctctattttgtttcattggtctatatgcctatttttataccagtaccatactgtttttgtgactatggccttttagtatagtttgaggtcaggtgatgtgttacctccagatttgtccttttagcatagtcttgctttggctatgtgagttcttttttgattacatatgaattttaggatttttttcaagttctgtgaagaatgatggtggtattttgatgggaattgcattgatgggaattgtgttgatggtaatttgatgggaattgcattgaatttgcagattgcttttggcagtatgatcattttcacaatattgattctacccatccatgtatatgggatttgttttcatttgtgtcatctatggtttctttcagcagcattttatagttttccttatagaggtctttcacctccttggttaggtagattcctaagtattttactttttatttttgcagttattgtaaaaggggttaagttattgatttgattctcagcttggtagctctttgtgtataacagtgctactgatttgtgtacattaattttgtatcccaaaactttgctgaatttatttaacagttttagagggtttttggatgactctttagtcatccaaatgtctctagggttttctgggtacacaatcatgtcatcagaaaacagcaacagttggacttcctctttagctatttggatgccctatatttttttctcttgtctgattgctttggctaggatttacatactattgatataggagttaaaaagaaattaggcagatagggatggtaagagagtcctcaataaggttttccttttaatggagagcagcagcccccaaattatctcttttctgacaaagagcagcctgttaaattgaactgcagacatagataagcaagctggaagcttgcatggatgaatgccagcagctgcaccaacagaaaaaggctacctgggggcaaggcatgttcaacatagtggctccatctgcccttttctttgtcgagcacatgtacagtaagaaacagacaacatggcactggccaggtagagaacccatctgcataacaaaagattaggatggggtgaccaggttattcatgcactatgtaaatggcacacacagtcccatcaatctttaggccctatgtaaatcaggcactgcctcctcaagccagtctataaagctccgtgcactttgccgtggactggaagacccatttgggagcccttctttctctgcagaagagagagctattctcttttctctttcttttgcctattaaacctccactctgaaacttactgtgtgcctgcatccttgatttccctggcatgagatgatgaaccatggatatttaccccagacaatgatgctgcttcagtatgttgaataaaagtggtgaaagtaggcatacttgtcttgttccagttctcagggggaatgcttttgatatggtttggctgtatccccacccaaatctcatcctgaattgtagctcccataatgcccacatgttgtgggagggacccagtgggagataattgaatcatagggtgggtctttcctatgctattctcatgatagtgaataagtctaatgagatctgatggttttataaaggggagtttccctgcacaaactctcttttcttgtctaccgccatgtaagatgtgcctttcaccttccaccatgattgtgaggcctcccaagccatgtggaactatgagcccagtaagcctttcttttgtaaattgcccaatctccagtatgtctttatcagcagcatgagaacagactaatacagtaagttggcaccagtaaagtggtatgctgctgaaaagatagccaaaaatgtggaaacaactttggaattgggtaacaggcagaggttggaacagtttggaggattcagaagaagacaggaaaatgtgggaaagtttggaactccctaaagatttgttgaatggctttgaccaaaatgctaataatgatgtggacaatgaaatccagtctgaggtggtctcagatggagatgaggaatttgttgggaactggaacaaaggtgactcttgttatgttttagcaaagagactggcagcattttgcccctgccctagagatttgtggaactatgaacttgagagagattatttagggtatctggcagaaaaaatttctaagtagcaaaacattcaagaggtgacttgggtgctgttaaaggcattcagttttataagggaagcagagcataaaagttcagaaaatttgcagcctgacaatgtgatagcaaagaaagtcccattttctgaaaagaaattcaagacagctgcagaaatttacataatttacctaagtaatgaggagccaaatgttaatccccaagacaatggggaaaatgtctccagggcatgtcagaggtcttcatgacagctgcgaccaacacaggcccagaggcctaggaggaaaaagtggtatcaagggccagacccagggttcccatgctgtgtgcagcctaaggacttggtgccctgtttctcagtggctccagccatggctgaaaggccccaatgtagagcttgggccacggcttcagagggtgcaacccccaagacctggcagcttccacatgatgttgagcctaccagtgcacagaagtcaagatttgaggtttgggaacctccacctagattttaaagtatgtatggaaacacctggatatccagatagaagtttgctgcaggggcaggcactcatggaaaacctatgttggggcagcacaaaagggaaaaggggtgggtgcctccacactgagtcctcattggggcactgcctagtgctactgtaagaagagggccactgtcctctagaccccagaatagtagatccaccaacagcttgcactgtgcacctggaaaagcacagacaatgccaacctgtgaaagcagccaggagggaagctgtaccctgtaaagccacaggtgcagagctgcccaagaccatgggaacccacctcttgcatcagcatgagctggatgtgagacatggattcaaaagagatcattttggagctttaagatttgacttccctgcttgattttggacttgcgttggggcctgtagcccttttgttttggccaatttctcccatttggaacagctgtatttacccaatgcctgtacccccattgtttctaggaagtaactaacttgcttttgattttacaagctcataggcagcagggacttgccttgtctcagatgagactttggtctgtggacttttcagttaatgctgaaatgagttaagactgtgggagactgtggggaaggcatgactggctttgaaatgtaaagacatgagatctgggagggaccagggcagcatgatatggtttggctgtgtccccacctaaatctcatcttgaattttagctcccagaattcccatgtgttatgggagggacccagtgggagataattgaatcatgggggcgggtcttttccatgctattcttgtgatagtgaataagtctgatgagatctgatggttttataaaggggagtttccctgcacaagctctcatttcttgtctgccaccatgtgagatgtgcctttcaccttctgccatgattgtgaggcatccccagccatgcggaactgtgagtccattaaacctctttcttttgtaaattgcccaatctcaggtatgtctctatcagcagcatgagaacagactaatacagctttccacttttccccattcagtatgttagctgtgggtttatcatagatgacttttattacattaaagtatgtcctttctatgcctattttgctgagggttttaattataaagggatgctggattttgtcaaaggctttctctgcattgattgagatgatcatgtgatttttgttttcaattctgtttatggggtgtatcacatttattgacttgcatatgttaaaccatccctgcatccctggtatgaaacctacttgatcatggtgaattgtctttttgatatgctgttggatttggttatctagtattttgttaaggatttctgcatctatgttcatcagggatattggtctgtagttttcttttttgtcatgtcctttcctgtttttggtattagaatgatattggcttcaaagaatgatgtaaggagtgtttcttctttctatatcttttggaatagtgtcaatatgattggtacccattcttctttgaacatctgatagaattccgctgtgaatctgtctggtcctggactttttttgttggtaacgttataattaccatttcaatctcactgcttgttattggtctgttcagagtttctattacttcctggtttaatctaggagagttgtatatttccaggagtttatctaggttttctagtttatttgcataaaggtgttcacagtagccttgaatgatcttttgtatttctgtggtatcagttgtaatgtctcctgttttatttctaattgagcttttttggatcttctctcttcttttcttggttaatcttcctacatggtctgtcaattttatttatcttttccaagaacaggtctttatttcatttatcttttgtattgttttggttgtttgtttcaattgcatttagttctgctttgattttggttatttcttttcttctgctgggtttgggtttagtttgtacttgtttctctagttccttgaggtgtgaccttagattgtctatttgtggtctttctgagtttttgatataggcatttaagactatgaactttcctcttaacactgcttttgttatatccaagaagttttgataggttgtatcactattatcattcagttcaaataatttttaattttcttcttgatttcattgttgacccaatgatcattcaggagcagattatttaatttccatgtattggcatcattttgagtgttcttattggagttgatttccaattttattccactgtgatctgaaagagtacttgatatgattttaattttcttaaatttgttgagactcattttgtggcttatcatatggactatcttggagaatgttccatgtgctgatgaatagaatgtatattctgcagttttggggtagaatgttttacaaatatctgttaagtctatttgttctagggtatactctaagtccattgtttctttgttgactttctgtcttgatgacctgtctagtactgtcagtggagtattgaagtcccctgctattattatgttgccctttttaaactcctatgtgtcaattaaagacaggctttttccatctagtgaatccaccattccccagggccttagagtcctaccttagatgggaaaactagaccctcatagacggccaattgctccttcacatctcagtccagatgcatggggcccagaaaatgtagttcaatgatttgacaagaagagaaaaatgttggtattagggagttctagaaatctttgccttcagattacagaagatagcttttatcttccgactatattttaaaatttaaatggtattaatgatattaatggttactaatgtctttctctgttttttcatgccattctattttatatgtaataaagaacttaatatgctgttacttttcttgcctttctcatctgctgttttcaatgttcagtttattattattgttaatattgttgttatgatataatttttttatgcaactattttctctaaatagcttcagtacttatcagcaattcttaaactttcccaatcttgagttctggatcttgattaatctttctgtcttctgaagaagattattggatagttttatcatgaaacttaaaaagatcaattaattagttttatgttctctaaatgtttggtgatataagaaagtatttctctcatctttgcacattctcttaaatttgcccaaataagaaagtatgtctgttgtttttacacataagtaaccatttaaatgtgtataaaattcttggattaaactatttcccctcaaaacttgttgaaattgttccattgtctttcaacatttgacattccacataagaagtttgaagcttatctgatttttttctcctttataaatgttcctaatttttggtttacctttaaaatgtttcaatattccatgatatgtctatgtttggatatattgtgattattttggagaaaactgtattagtctattcagtttgtagacataagtcattttgggtaaggtttattggggcatttcatatccataattatttattgcatttatttttaaggtaattagactttttctgttctcgatgtctataatttttactttcactgatgtccttgtcattttcctgttaattctttgatattgtgcatttttaactctgctcatttctgctttcaacgtacgttttaattctgccattgctttacatggttccttgctctcctttcttatttaaggcagacccctttacatctctgtctttgtggctgtctttttatgattttacaaacctacttcatagaggcttctttttcataaagtaatgtcccttttttatttttggtacaccatgcaaatattttataaaacctccatcccattgtcatagaagtaatatacacaaaacttctgccttggaaggttctagacaagatttcccttgtcttatgctaggaagaagccttgtaacttatgtttttctatttaaaaaaggagagatacattcagacccagcttttctcaatagacagggagggtgaaatttacttgcctcttcattcagctgtttccatgttaatagccttcctctctcagaggtaaaatcaaggtcatcagcctttaattttgtgctggtctattgaactgaagatgtatcttctgtttcttagatggttcactgacttaggaagagtacatcaaagtttaaagaccttatttgagcaatgaaaaagatgcttctatgcatgtactgctcccagaacttctcatgtgataaccaggaacatgtataaaattgtatgtgtttctacatttttctatgttttggacttccaagtgtaacatccacatgagtggagaaacaagtgttgaagcaaatgttggaaacagggagaataggccagaaatccggtacttgttacccagaagtgctgcctgtttctgttctcaagagcctccatatcatgcagtaagacataaacaatggaacggaatcaccatcttttcctgttgtcctaggttctgttctgtttcagagggactggcatacggtgcatggctaagaaaggacatttaatggggtctcatccagacattgacatgtgatctttgctcatcttgaacttgtgctagtggaaatatatttaatgtatctacataggtatattaattggaacttgatagtgcagataacaggcacatttaataacccaagtgaaattaatttatatacgtaagtgaagtttgaaagcatttcattaatattatatctttagggcttgactttataatcagcctgctcacttaacaaactaaaattcaacataaactacaaatctagtacactttgcattataccatagcagccacaaattaatgagtaataaataatgctgtgagacagtagaaaatgatgctagtaacagaagaaacgtttgcactcactacacccatggctttgctgtacttgacgaatattatcattcaggaaaatgttaagggattttaatagtcagttcctgccgatgatcaataatgacctcattattgcatgtgcttacatttttgtgacatcagaggaaagaaacactgcaaaacccagaattttccaaattaattgctaaaggtcttccaatacaaactcttccaactacactggcacatcatacccttttaactatttctagagctaaagtgaaagcagtagtgtatttaggaaaaacaaaaagaaaaacctagtattcagtttttatgcaaaatcaccaagactttaatgtaaaggggtcctttaaagaaacatactattctcaaagctatattactttatatggccatatgctgggatctcacatataagtgaaattggacttcaatagccataaggagaaatgccactttttcctcccaatccttggactaatgctgtttaactttttttctttttttttttttcctgagacatggtctcattctgttgtccagcctggagtacagtggcacgatctcagctcaccacaacctctgcctcctgagctcaagccatcctactgcctcagcttcctgagtagctgggactacaggtgtgtgccatcacacctggttagtttttgtgtttcatgtagagatggggtattgccacgtttcccaggctggtctcgaactcctgagctcaagtgatctcagcctcataaagtactaggattacaggtgtcagccactgtgcccagcctgagcaatttttgatgcataatttgacatgaaatttcagaaggcttgtaagccaacactccacccccatcctaacaaactaaggtaatcgtttctgcttaaaagtctctgaaaataatactgatgtaagtagagcagcataatacttcctacctaagaaaatatggctgttttcatgttctcttgttaaagaatcattgtgggcagataatgagaagcagagcctaaggaaaagaatggataaattgggaggaagaggagaaaaaataatagactggtctttgaaaggataagggttgaagaattgatgagttatatttgcaagacagttagtgattgattttggtatcttttaaaggcttctctacattatagaaacacattgaactagaagagaaggatgagagccctgataaaaatttaagtattatcctgagccagtccttaaggggagcatgctatgtagccctgctacattgacaatgtatataaaaggatatctttctaagcatccttctaggtatcagttagcgaatgttgttagcaagttaaaaaaatgtctctaggatctgtgtcaggaaatgctcttatttgtattagcctagtcttctctctaagattatgttacttatgagcagaagttgttctatgtactgtatactttcattttcatcttagtttcctttcataagtgttatatcaaagttctgatgattcattgaataattataagtagcaaaattaaaatatttaaaggaaattaaaaagatgagacttttataagactcatattcctacataagactgcaattaattatgagattgggaaaaaacgcaaattattaaaaaataaaaactgaccaggtgcagttgttcatacctctaatcccaacagtctgggaggctgaggtgggtgaatcacttgaggccagaagtttgaggccatcctgggaaacatagcaagaccctgtgtctacaaaacactgataaaaattaactagtgtgatggcctgagcctgtagtcccagctacttggaaggctgaaacaggaggatcgcttgagcccaagacatcaaggctgcagtgagccaagattacactactgcactccagcctgagtgacagagcgagactctgtctcaaaaataaataaataaaataaaaactatcaccaccagcaccaccaaaaaggagatctcataagctttttttaacatttccaaaacaaaggctctctaaacttctttttttctcattctagaaagctaatgatagaattttttttttcccctgaaagcctcagctacattcaccatgtcctgcatttattgttgacagctgttcaagacctacaaggtgaagttgaatattacacacttttttggagttctgctacctcaaacgactctctaaaaatcttgccagatgtaaactctcatgtcattggccacctaaagccaaacacagagtattggatctttatctctgtcttcaatggagtccacagcatcaacagtgcaggacttcatgcaaccacttgcgatgggggtgagtccagattctaaaggatatttgcctcagagatgcgaatgaaattgattgattcttgccggggttgagatcagtcatccctccattataaaatttccggtgtgggagggaagggggtggaggctaaaatgcttaagtgctcactgtcatcagtagcagatcaataagcagtcccattgagacagaagcacaagctctaataatgagatattagcccagtttgttcctgttcttttcagtgtatacttattttagaactgagttcacatcaataaatggtgacatttagaaactttttttttaagatttgccctcagaagcagtacgtttttcaaaacgacagccaaacacagtgagagccctccctgagtcaccagaaatggtaggtggaagttcagccactgagaaaaattgcctgtgactcatttctaagccagttagcaagggggaggaagcaagggaagcaacttgtgaatctgaaatgtgtttggaatggtctttctaatcttttttggctttataaagtctcattataaacattataatatcattacctcccaagcaagtgttccaggtcattagcagagctctttaagtgtggaacccatttccctttgtggtgccaaaggtcggcaccttttgtttataaaatagggtagatcacaaggacaattcttcaactagttaagatgggttcttatgataaaaataggtctttgcatagttatttctgacatgcttgaataattatgcaatttaacgctaagcaagatttttttcttatgttagatttcatcattacctatggtaatcaacattcaaaatcatttacataatgacaatattgcattattgcttcatattgcttgagttacaagctagtaacatcaaatgatttttcacgttccaccagcctcattgtatttgagttttattttttgctcaaggagcaaattttatttccttccctccctcccctgcaccttggaggtatagagtgaaaggatggaaaaaagacaaaaaatagataagtgttagtggtgcagatgggtgaataatttatcatcatatcccactggtcacatagtattgaagattagcactatgctggtggtataaagcattttaccaccaattcttatggtttctaactgagagtataataagccaatttacagaggactacagactgtgataacttcatcagcgaaaagcagataagcgaggaaccctttgctaaacctaaatactaatctgcatttagcttaacatgtgctttttcagagacagctggagtttattcagtttcttcctttaattctagagcctcagggcatgcttcctccagaggttgtcatcatcaacagtacagctgtacgtgtcatctggacatctccttcaaacccaaatggtgttgtcactgagtattctatctatgtaaataataagctctacaagactggaatgaatgtgcctgggtcgtttattctgagagacctgtctcccttcactatctatgacattcaggttagaacattgttttttgatggttaggcttatggatatgttaaataaaacatgccaggctatgtcttcaagtggatatcttctgtcttggttacagattatttctttggtggggaagggaaaagagagaagggaaattgatcagaattaaatctgtgtgctgtaggcaaacatgtgagtctctggagagaagataatgataatatggaaaacgatggtgatgaggatggtgatgaaattctcactggcaaaataaagctaatcatgtattctaaataaatcttgttgagcagcttaccttttcccaggatcttttactgaaatcaaaatcagaatcagtttgtaaatgtggagatgtttttttctcttcccatttctcctatttactaatttaatatctccagagaagttatgaaacttcacttggtgtcaatttcctcttttgtaagcgcaatggactagatgtcttaaaacattctagccacctctagcattctgtgattctgaatgcaacaggaagacatatataaaaaatatagcagacaaaaaatattaaaaggttttatctgaaggtgaaagaaatatatttattcatcactcaaaaaatgttcaatgttctccgcatatgtgagagcaattgtggttaaaattttttgcccttggacttctttgagaatcttatgaagtcagtgtactctgccttagaaaaatatttatgcacttgtatgacaaaatttaacacataatttcagaaagtgcactgatcacttgaagtcaaattcatagacttcttcaggggctactggccttaaaagtagaaaaagtatagggaatactaaggcatataaaacaaggaacttatcttcacggaattggaaatcttgttggagtaccaagccataaaagataacaaggctaaatgtgcaaatgagtgataaaaaaaaatcagagtatttcagaaaccccacatttagagaaagcttgcaatttacaaaattttttaataaactatgctacttctaaaattcataagagcttcgtaagataattttcagaagatattaagcacagaaattttatatgaccacagaaactttttactggttctatccatttaatagtactacctcattcaggtttccatctccttttcctgacatttgaggttaagacatataatcatctggctacaaccaacactttagtctcccctactctgactcatagacctagcttcctaagaaaaccaaataaaaatatctttgaataaagaagaaaggtacattaattatttttctttttttttcatttaaatgtattttattttaagttcctgtatacgtgttcaggacatgtaggtttgttacctaggtaaacgtatgccatggtggtttgctgcacctaacaacccatctaccaggtatttacctgtacatgtattattagctatttattctgatgatctccctcccctgatgcccccccaacaggccccagtgtgtgttgttcccctcgctgtgtccatgtgttctcactgtacagctcctacttataagtgagaacatgtgatgtttgtttttctgttcctgtgttagtttgctgaggataaaatggcttccagctccatctatgtccctgtaaaggacatgatctcattcctttttatggctgcatggtattccatggtgtacatgtaccacattttctttatccagtctataattgatggacgtttgggttgattccatgtcattgctattgttaatagtgctgcaatgaacatatatgtgcttgtatctttataatagaatgatttatatttctttgggtatatacccagtaatgggatggctgggtctaattgtgtttctggtcctaggtctttgaggacccaccacactgtctttcacaatggttgaactaatttacattcccaccaacagtgtaaaagcccttctatttctccacagcttcaccagcatctgttgttacttgacttttcaataatcaccattctgactggcatgaaatggtatctcactgtggttttgatgtgcatttctgtaatgatcagttatgttgagctccaggtgcccaccaccacaccaggttattcttttgtgtatattttcagtagagacagggtttcaccatgttgaccaggctggtatcaaactcctgacctcaggtgatccacctgcctaagcttcccacagtgctgggattacaggtgtgagccactgcacccagccaagtatctactttttgaataatccctttatatgtcccttttacaaagaaataataatttcatttttattcagttttacctctttttaatataaatatagtaagctttatatgtttgttggccgcataaattcttctttggagacgtgtctgttcatgtcctttgcccattttttttgatggggttgttttttcttgcaaatttgtttaagtttcttatagattctagatattaaacctttgtcagatggatagattgcaaaaattttctcccattctgtaggttgcctgttcactctgaggatagtttctgttgctatgcagaagctctttagtttaattagatcccatttgtcaatttttgcttttgttgcaattgtttttgatgtttttgtcatgaaatgtttgcctgtgcctatgtcctgaatggtattgcctgggttttcttctaggatttttatagttttgggttttacatttaagtctttaatccatcttgagttactttttgtataagatgtaaggaagggatccagtttcaattttctgcatatggctagccagtttttccagtaccatttattaaatagggaatcctttccccactgcttgtttttgtcaggtttgtcgaagatcagatagtggtaaatgtgcagtcttatttctgagatctctattccgttccattggtccatgtgtctgtttttgtaccagtaccatgctgttttggttactgtagccttgtagtatagcctaaagtcaggtagtgtgatgcctccacctttgttctttttgcttatgattgtcttggctatacaggctcttttttggttccatatgaactttaaagtagttttttctaattttgtgaagaatgtcattggtagtttaatgggaatatcattgaatctattaattactttgagcaatatggccattttcatgatatttattcttcctatccatgagcatggaatgtttttccatttgtgtcctctctgattttcttaagcagtggtttgttttcattgcacaccatgattcccatagcctacctgagttgtcttagcatggaatatgtggactgatgtttatgttcatgattcttatggtgagtccatgtatgcaggtagaccataggccaaattatgaaatagaaatcatgctccaaataaattagaaatatagctatataaaaaaggctaacacaggaaggtgatggaggatttgccgtattgtcttcttttgaccagtgttcgggaaagctgagttttcaaaggcaccttattcatttgctttaccaagactcgaaacacacaacctagaagtgagaacactgtgtgctgtgcatgcatgtgcagctcagctttctgactctggatcaagagttaacgtttaaaagtgtttaaggcctattctatggaaaaggctttatttataccactactggtttgagtcaggtataaataactcaagccagtaggtataaagcctcctcttctggtagcctgaggagagtggaaacagatgaaaatacaaaagatcaaagtagaatccaataatagaattttgttattagtgcctaagatattcttattactgattactatattttttgtgaagctttttgcagtccaggaatactgtacttgatatagctgttgcatttctggaaatttgaacatcaaatttcagtgattttcattacgatgtcaaaggtgatttagtttcatttaaaataagcatttgattggaatgcctaatactttagaattaaggctctctatgctaaccccatctgtaaaatagctattgattttaaagcacataacacactcaagtatctacttttttttttttttttttttttttttttttttgagacagagtctcactcttctcacccaggttggagtgcattggcacgatctcggctcactgcaacctctgcctcctggaatcaagagattctcgtgcctcagcctcccaagtacctaggattccaggtgcccaccaccacaccaggttattcttttgtgtgtattttcagtagagacagggtttcaccatgttgaccaggctggtatcaaactcctgacctcaggtgatccgcctgcctaagcttcccacagtgctggaattacaggtgtaagccactgcacctagccaagtatctactttttgaataatccctttatatgtcccttttacaaagaaataataatttcatttttattcagttttacctctttttagtataaatacagtaagctttatatttgtgtttcattcacatgttatacaatatcgttttagcactagaaataggtcccaaaatggagactgggaatgttaacattagtaagaataaaaacatattggcacatttctctaacatttgaggttaaaacatatataatcatctggctaccagcagtagtcattggtcattttcctttgaccaatgaatcaaaagaaatgttttctggagaaacatttgaatatacctaagtagtttagagcttaaagttatgtttaacatttagatgagaagccagtagggtacagtggagaacaactcagatatcccaaatcttaccagcttgacaatattccctggcttctctgcaaatttgtttaaatggagttatgaggaatcaatacgattatttgtgcatatatccattataatatttggcacatattagatacataataaattcagttgaattgattctgggttatctcattatgtatcacagaatcaaatttttccaatatgtataaagttcattttcattaattatattacagcattatattttaagttcatctgcctttatttcagatttaattggacatgctcagaatgtaggcccttgatagtgtttaaatatccactattaatacctcaaaagactatatggcatcaataagtaacacaactcatacagcattatgaacatatgcctcaactaacatttaggtaccctatgaataaaatagcatatctagtaaatacaagaatcccatttgcctttcctcaaccaccaaaggaacagagaactgtttcacataaaagctcggaattaatgtttaagattcatcagtacctagcttgccttctctatttatatattagatgcttaaagtaaattagcactgtaaaaagtacagtttctctttggtttatcctttaattgagagcagaatgatatcgctttgcagatgttcccaatcttttgcatattcatttctctctcctccctcttggttaacgtgttccttttgtgtgactaatgcttgatgaaccccatttctaatcttcagttattccaccctcctcggtttttattcagattaggtggcagaattaaagggatgaatgatgattttctgctgtgattaaggtaaaaatacaattgcatctggaacaaatggatataaaatacctcagccatattggaaggcttctctaggcctcatttttcctccattagacattagcatttaggctatttgttttacagtgtcaagacttccagaagataccatcattacactacttagttatagatttagagaacagtgagcagtgataacctgttatgcttgcaaactgtcacttgggcatcttccattccttgactatgctcttcagtagattaatgtatctttctctttgtgaatagttgcaaccagagagtaaacatcatcattcccattactaaatcaattatcttgatcccaattccgtaccttcctctgagctcattcctttggagtcagttaacatcaaaaatgaatattgattaaacctcaagaggctatagagaaatacaagagattcatgtgaaatgagggaaggtgggattcagactattgttagtaagtatttcaaaaatggttgcatttattttttctaaactaatgtttgcaggttgaagtctgcacaatatatgcctgcgtgaaaagcaatggaacccaaattaccactgtggaagacactccaagtgatataccaacacccacaattcgtggcatcacttcaaggtacaaaattttgtgtcagttaaatctaaggaactctgatcagaagaaatgaaaataaaaatcaaaggtatcctctcagccatgacaatctcatttaatgggttattataagtatgtgtgtaaatcaaatttttgatattatttcacagatattaatcttcactggacatccaatggcatttaatctttaatttccctgattgcccagcctcagatttcttatttagtaacctgtaagcaaatacttgaaatacatgtctccttatttgaatgtgtcctttagtgaatccttttgcggagcataatacaagcttaattgtaatgactaccttctaacttaatctttttgaaaaaaaattgatttatatacatcagagtgccctaaagctagaaatctgtaaaattagtagggcagataatgtttagataagcattaccaattttgtcagcttcttggtagaatcactttatttttctttattcttttgttgctgagaaatgaccatagtttgaaagcgagtctctttataattcataattagtaacaacaacaataataataatatttggtattgtttccaaagctgaaaataagatggtaaattgttcatccgtttgtatcaagttgaggctgggaaaagaaatcttagtgctttcacattatactttttgcttaagccaaatgaatcacccttctcttacatgtgcaaacaacacacacacacacacagacacatacacacactgaaataataagtctattattaatgtttcaattctgaaggatttctctatgacatgttgaaatttctggatcttaaatcagttcaaaaaattagtactggttttggcaaccaatggttaaaataattagaaaaattcaactaacctgactgttagctgttcgtggcaataatcatatcttgtctgcttgagtatatcttctatcaaacacatgatagatactgatctaatttttggcatactaattagtttataatccccccagcagatatcccccaacctattcacagtattatctactatgcagggaggaaatagtcatattaaatgggcgttagagacctttattctttagcaaacacatctgtggctataataatatagaaggcaaggtggggcgtggtggctcacgcctgtaatcccagcactttgggaggccgaggcgggcggatcacaagctcaggagatcgagaccatcctggctaacatggtgaaaccctgtctctactaaaaatacaaaaaattagcagggcgtggtggggggcacctgtagtcccagctactcgggaggctgaggcaggagcatggcgtgaacctgggaggcggaacttggagtgagccgagatcacgccactgcactccagcctgggcgacagagtgatactctgtctcaaaaaaaaatatatatatatatatatatatattatatatatatatataatatatattatatatatataatatatattatatatataatatatattatatatatatatataatatatatacacacacacatagaaggcaaaagtaatacaaaagagcataagacatgattctaaatttgcaaagttccagtccactggggaagatactcccctaaataaatgtttatagaacaatgtaaaaaacactataataagaggtttagatgtgcaagaacataaagagaaaaatagcaaactttacccagaattatcagtgaaggcatcatggaagatgtgacctttgacttcagtcttgaaaagctcaaggaagaattatagttaggtgggtggatgttttcaaattcttgtctgctggcatccccatgactcaagcccatgtgaatgacgtaacagaatatgcctcatagtacatatttatttataactaaaaataacgtctaagctttataagaaatggaacaaatgtgactgtgtctctaggttttttttcctttaagaagattattgcacataataacagaggacaaatatttttagttgctattaaaaattgcttgtatccaaatacattaaattgatgacagaaacattaaaaagagtattatacaacaagaacaaggaaagtgagagaggagacaacaacagaaaagagattgcaacacaattttgtaagcaatatttgtcagaaagaagcaaatgatttaatacagtggagaaatttacaaccaaaatattggttgacaaaagacaataatgacaggaaacaaactgttttttccacagagaactggagaggctgagcacttagaagttttaaggatgtaaagaggaggagagagggtagggtttaaagctgaaatcatggggtgagacacaactgttaacaaataagtgtttggaatcccaggtctcttgcatctttgctgtgcatccaggggtctatttctcttcctccacatgacaaagtccaccgaccaggagattagacatttattctctggagaaactgagggctactaggcagaggggagctgagatgagacacagaagtaaaaacagtgataaagtgagactacaacctgaatggtgggctttttggctaagtttcccagttctgccctcaaaagcaagtagacaagtcataaacacctccagataggaaactgaacatagttttctagaaaaaaaagaatgatctcaaaaaaaatacctccagataatagcatatagggatccctaacagtaaaaacaacttgtcctctggtcacccagtagggaagtatgccaatcaacaaggctcacctaactataaagcttttagtcagctttttttttttttttttttttttttggtgcatcactcttaaagataaaaaggggaccaaaataaacaaaagacatgatacaatagattcagagataatgcaggtgaggaaaaaaaattatagcctcagacagataaaagaaaattctctaaccataaaacaaaaccagcatacttaaaaaaataaataaataaccaacgaggagaaaacttcatggaaattaaaagggtgaaaagctgaattgaaacttttgaagaaagttcaagggaatgtctctgaaaatgcaatgaaacacaaagatttaaaagagagagagacaaagaaaaaacaatagagagtatccaggaagtctaatatttgaataataagagcttcaaaagagaatcaaaggaaaagagggagaaaatttaaaaaaaaaaaagacaagaaagtatcccagaaccaatgtactactgtgcagatcaaaagattccctggataccaacaatatgactaaaaagtgattacatataaagggatattatcaggaaattgcagagtaccatgtttaaaaagcacatccaaaaagctgccaggaagaacagacactaccacaatcaggatgtgaagcagcatcatgatgtcggtctccattattgctaacccctcttctacccttcctaaaactaagcaaacactgccatgttttgttatgtataattctgccttttccatattgtcatgtaaatggatcacataatatgtagccattcaaatggcttcttttagttagcataatgcatttaagatttgtccatcttattatatacatactagcagttgtatacatactagtagttgtcagtttttgttgctgagtaagattccattatatgaaagttctacagtttgtgcacagtttggataattttcagttctccgtgaccacgattaaagttgctgtaaaacatctatatacaggtttttgtgtgaagatatattttcatttcatgtgggtaaatacccaggagttggattgctgagtcataaactgccagactgatttacaaagtgactgtaacatctttcattcctactagcattgtatgagagttcaagttgctctacatttttgctagaacatgagatactatgaggtgttttcctcttattttttaaatagtcattttaatagatgtttgtggtgtgttattatggtcttaaattacattttccctaatgactaatgatactgataagctttgcaattgctttttgcatgcactttggcatttgtttactctgggaaatggtatctccaaatcttttgcaaatttcttaattagattctttgttttcttattttttgagttttgaaaattttttaaatatattttggatttgagtttttgtcacatatgtgatttacagatatttcttctctaccttatgatttgttttcaattatcttatttgtgtgtttttaagagaaagagttttaactttccaagagagttagatttgttactttttccttgacagtttgtgcatctggtattttatctaagaactttttgcctgagttaaggtcacagagactttctcttgtctatttcctagaacatttgtatgtttacatgttgaatttatgtctatgattggttttgtgttaatttttgtatacactgaggcatgagtcaaggttaattttttttggcatgtaagtatttaatagtatcaacaaaatttttggaaagattatcttttctttattgaatatttttagatttttgtcaaaaatcaatttaaacacgttttgtaggccatttttggactctcttttatgttcaatttatcaatatgtatatctataccaatatcgcacaatcttgattactacagctctatagtaagctgtcaaatcacattgtatgagtcctccaactttgacctttataaaaatcattttggcctttctcactactttgcctgtccatataaatttcagaaacaggtcattgatatctacaaaacatgtgattttgattagaactgcattgaatttgtggatcaattggtagagaattgacatcttaacaatatcaaatgttctgattcaagaacacactcttgctcatttatttgcatcttctttcctttattttatcagtgttttatataatccagtatgcaaatactgcacatattttattaagtttatacctaattacttatttggggggtgctattattattgtttctttaaaacaaattcaaatccaattgttgctagtgtgtagaaacacaattaattttggaatagtgagcttacatccagcaaacttgctaaactccttgtaagtcttaagagcttttttgtaattccctagtctatatagatcttctacaaagagaaactgtttatttttttcatttccaatcagtatgtcttttatttctttttcctgccttattgcactggatagtttaataacgtgataagagcatatccttgacttgttcccaatctttgaaagaaaactttcagtcttttacccttagatgtgatgttacgtatgaaatttttggccatgccttttatcacgttgaagaacttactttttatttttaatttgctgacaattttcattataaatggacatggaaatttgtcacatgcttttttgacattttaaatttgtactatgatcgattatatttactgattttaaattattgaactagtttgtattcgctggataaccagaacttcgttgtgacatattttcttcttcatatattgggggatgcaatatactattatcttatagaaaatgttcatctgtgttcataaaatatattggactgtgtttgattttcttgtaatacctttgcctggattgggtatcatggtaatttctggtctcatactaacttgggaagcatttccttcttttctattttgtggaagagattgtacaaaagtgttattatttcttaaatcttggtaaaattcaccagtgaaacccatatttgcctggagtttttctttgatggaaggttttttaacttggaattcaattcccttaataatgtatgatatttggcaatttattctccagtgagtttagtcatcttgtgggtgcagaaaataggttaatttaatcaaatttgtcaaatttattagcaggaagttgtttgtagtatgtttgtactacaaacaacaatttgttgcaattgattttattctttcatttctgatattggtagtaagtgcccccgtttttctgttcagcctagagttttatcaattttgtagatcttttcaaagaaccatttttggctttatttattttctatatcatctacattgttttctattttccatttcagtgatttctgctctctattgttttcttccctcttgccttgctattgcttctctagtttcttaaagatgaaaactttcattattgatttgagacctttcttcttttctctcagtcctgcttcggtatgaagctcacaaattttgaaatgttgcattgcacttcatttattcaaaatatattttaatttctcttgagacttctttaacccatggattatttacaagggtattgtttaatttccaagtatttggggatttttcagataagtttctatctgagtttccagtttaattctattatgatctaagaacataattttagaattccaattcttttaaattagttacagttttttcagggcccagaatatgatctatcttagtgaatggatgtgcacttgaggagaaggtacagtctgttgttgtcagatagagtgttttgtaaatgtcaattagatcaagttgagtgataatggtgttcagatcatctatatacttactgattttctgcctgcttgttttatcagttattgtgagaatggtgttgaagtctccaaatgtcattgtggctttatctatttcttcttcagatctattagtctttccttcatgtactttgatgttttattattaagtgcatacatgtttaggattgttaatgtcttgataaactggctcttgtatcattatgtgataagcccttttacttcctgataatttccttgttcttaagtttattttgtctaatattaatatagccactccagctttcaattgcttagtgtaattctgggtgatttttcgattgattccttcacattttgaatattacgttataaaaatctgactcctgttaaaatcctttgaagaaagttagagttcttatttacttttttcagcaggttaccaactggttagcttcagactccaaattctgttttcctttgccagtgactacagtcagttcctattttttcataaagtagcataacaaagctataaactttgctttactactctgtgtctgcacaatggctaatttgggatttggctgtagaattatgtaatagttctgatctcaaaatcttcgctgtgctgcttgcataggctatgcatgtgaggcaaccataaatgtgcagcttggagttgagtcaggacttgcgttcgttcattcataaaattagcttctagctttcttctctctgaaatgtcccccatctttccagctcctttggacttccttccctggatttttggctagaatgatatgatttcttttgaaatgtttgcctcccagcctgcctccaaatttgcataactggagttgttcttaggcaatgaggtaagaggaattcgagaaaaaaaaataacaaggacttcccccacattctttggactatagaggccccatttcctgatttctctggacagaaagatttttccccccgttggggctttagattccaatttggccacagctgccgcagtgcagctccttggctctgatcatcctcggagcagggcccagcagaaagaagacaaaacaaaacaaaaatgggggttttccctatactctctggcttgcaaggcattttgttctagatactctagccggaaaaaatttactttctctaggattttgcttccctagttcacagtttcacactgatactgcccttgggttaaagatgggaagtaaaggagggggaaaaaaaatgggaaactcaccctgtaacattcattcttaaagttttgtctcccctcctgatcagccttattgttagcttttcagagtcctcaggtagttactttatataatttttgcagatactgagttgtaatcagtgggagagataagctgtaatgggcttattccatattggcctgcatgggaagtccccctccaccacagttttctttcttccaatgcctttggcaactttccttttcccccccagtcagaagcctagcaaaaacttgatagaaatcattcataaccaaatattggcatgtaaaatctttcctttcttaaaatgatccatagtagcagagtaacattttccaaaggcaagactctaatgagcaactataggctgccaagccattaatcaaaattataccaacaccaaagcagttagccttgtgtgtgtatggtattgtttgtgtaatttcattatacttctggcaatgtatacttgttagttatgtttctattttggttttaaaaaatctttcatattagcaacatgcaaaatgaaatgtgaaatccttccagaaaaacatcagcagacggggtctacttctctagcatttaaaataatttggtttctaagaagccatacatttcttagattctttgtttatttttggtgaaattcagaagtcagtaaaatttaactcatatatttcaataacatacagatagcataccagcctgtttgattatatgcgtgcagtgtaccaactcatctttgtctttggccttaacttatgccttgtttttgactacatcttcagcagtacaagcccttatgcatgtttttcctcttatatataaaccaaagattccatagcacacaaataatatagaagaatcaaatggacccttctagttttataagctgctgcttcagagacaagccctgtttctacattgcattttccatacttctcatattatcatcagctccttctatatcccaaaagaatactaactactgatcgataacccggacatgtctggccatggcctacatgtgccctgggtagttcatttatttgtcttggtggatttgctagagtggaatttaatcaatagctaattcattaattctggtcctcgagaatgtagagactgacctggatgaagataacgggctgggtctggctttgatagaaatatgacaaacactgcagctgacagcttcactaggtactgtgctatgaagtttagttatttattccccataaatggagacactaagaaaataacacaaacaagaaagatgttttattacattactgttagtattccaaaatgcatcatttccaggcatgaggctcaagggaaagtagagaaagaactcagatcatgtcttttaatgtctttaattggaaccatggcagttttttcacatccaaatcagtttggggatgtgttattgataaggagtgtgaggtataaagtcttcgtagcactcacaaataattgttttaagatttgcttctagatgctgaatgagatcaatgatattcttatacacaaactttgcagaaatctttctgataacagcataggttagatgtctctaaatgaatgctaaaccactatcgttattaatgaatatctatatatttttttcttttttgttgttgttgttgagacaggatctcgttctgtcacccaagctggagtgcagctcactgcagccttgaccttccaggctcaagcaatacttcctcagcctcctgagtagctgggacaataggcatatgccaccacacccagctaatacatttttaaaattattttgtagagttggggtctcactgtgtcgcccaggctggtctttcgaactcctgggctcaagtcatcctcccgccttggcctcctaaattgctggtattacagatgtgacccacacagcacccggcatccccctatatttttaaattacttaatgtggggttaagtatggttcaagaggtcagagcttgtggagaaagaggattctccttttttcctcaccaaattttatgagacatgctatgatatactttttatgctatgacattagatatcagggaatctcttctatccttgattttttctgcctaacttttctcagtgaatgatagcttcaactgaagtaatgattttacagttttgtaaaattaaaagaaaaaattaatattttacatttaatttaattatttaacattacaagaaaaaattaaggccacatttctgtttgtttgctttaatagggagagtgttgggctgaaggatacagaatgtcaaatcacttgttttcacctgtataccaaacttgcttaccaatatgggcaattgtagactatttttaatatggactaaaactgtctgcttaaacctttaaaggatatgggtagaaccttgaaagagagaatttggactacactaagtgcaattcgtacagatccaatcaatagccttatggtcaccatggcttttaggaaatattactcatttgatggccatgagttctgattatcacattctgtttaaggagaccttaatagaatagtgtcagaatatagaatgtaaacagaaagacagaatatatagaaaagagaatattgggcttattattatggctctgctatcactattttcatttccttacctccctcttcttcccaaactcctcctaacttctttacctcttgtagctcccatagaaacagctcggtcgctgaagtagcctttgagtgcctttcagcaaaatccagttcttcctcctaattcactttagccctcaactgccactttgtccctggttctctaaacattcattgttttgttttgtttttattggttccattaaaaacccacttatgcattctgggtgtcctcaggaaaaagactccctaccttgctcaggtagttcagtcttgcaattttaagccatactgatgtctcaaagatctctggccctgttttcttcctaaactctaatcccacatacccacttgcctattgattttatgtcatgatattcacccatcacttccataaccatgagattcacaagttaattcttatctaactcatcatcttttccaacactcacttctgcaaatgtaccaccatcctgcatattatcgaggacatatatctttgaagtatttttaatcccctaagtttattaaacactgattttagtacattttctgttggagcatcttctcatatatgttactcttctccatttccaccactaccaccctggttcatgttttcatcgtttaagtttatataaccattttatggagctgtcttaatccaattagatacaaagagaaaaaaaaatcctttacttttcacctgctacttactgccttaaacacactgttttggctatccttccctcaattctcaaataccccacaggaacatcttatgggtttccaattatttttagttatgagtctcactttgataattaagattcatgatcaagtattaaaaagtccattccatcaccatcaaaatattagcctcgcatctagttcaaagattctatcatttctaaagctcaggcctaattgtagcttgctcttttcttccctcttactctttctttcctattccattttatccaaatatgttccctttcaattttattacttcactgccatcactgtttgacaatcacagctctccattggcaagtgatgctttcttgggcaattgtatgtttttcttgagaggtcctcatgagaatctttgaatagccaaattccctcacacgagtgttgccctttatagctgatcacttgtggtgccaaaagagcagaacattccaaagactcttcctgctggagtctcctcatgccagaaggccactgtcctgggccatgtaccttcaagttagctcaaacctagccatcttgcaaggcatccacttggctcttgagaaactcatccatctatgccatgctatagatcaatattgtggtattctaggcttaacctttcattgcagaactgctctggccaatctctggccactagaattctctaactgagaagtaagctttatttcctatgctcatacagactgccaaatttaagagttccctgtcaagctgtcccaagatctcttcaccacattttcctccaaggacaaaaggagggaaatgtgtgttcctttttattaaaagaacatgggttttgcattttgactttttacctactacaatttataataaacatctcagtaggataattaaatattcagtgacttgacttgaaagcaaagaattaaatttgtcatattacatttatttcatctttgttaaaagtgttctgatcatttttgataaccatgatctggaataatattgaagaacttgagtgttacataaatgattgacaaaaatgaccaaatcgattagaaaaaaagcctgtgtaaacataaccagataatctagagctatttaatccataacaatttaggttaatatcttagagtgtatgaagatttcttttctctggtcaaacaaaaatgttttgaaaaaattggggaaaaatattagaatgaaatgttaaagaatagtaatgtgaacctgtcttcataaaaatttgatctgacttgtatcattttgatattcacctgtgtaaaggtaagtgatatcaaattattttccctacactcctttgtatcttcaatggtattttgtacttcaagggacaactggaagtgatgagatctggggagggtgaaatgcatctgtaatcctaactagttgggaggctgagtcagaattgcttgaggccaggatttgagtccagcctgagcaacatagcaagatcccatctctaaaaataaataaagaagaaagtgatgacaactgtgggggtggcacaatagtatgtagtagtaacagtaataaaatagtaattctgctgacaatatgacataattaaaaagaaataactacaactagaatgtctgaacacttgatgaattcatgtaccaaaatatgtgtaaagaacttccagttccaaaatgatgacatagaagcaagctggcttcactcctctccacagaaaacagaaacaaatgtacagaactgagattatcacagcaatatcccagaactcaaatatgaggacaagacagttcccaaagtcacagagaagtgaaaatctccgagcagatggtaagaaaattggactttcatatccacaatgcccatctccccaatatattcagcaccacgcttgtggaaaatattttcctgacccttgatttctgcactggaaaagtgcgattgaagtggacagtttcccgaccgtcttaggttacctggcaggagacctttacctgcctcaacccacaggaagcatcaggagtgcccgaagggctctatctctgtgaggacatccagagacaatgtggggagatgggactaccatcaccagccctggaaattctgctctgtaactcagtaaaaggagatgccaaatcagagtggctgttcagcagcaccacactgtagtagttttgctccacaggtttcctgggcaccaatcctcagccagcctcctcacactaccaggatatcccctttggaacctcccctatttgggaaaggtggtattctgatagtttactggagacaaggcaaacctggacctgaggcaccatctagtgccaaaaaggaggcagtgacccagtgaattaaaaaaaatgaaagaaaatgaacagaaaaattacaaagaatctctatgcaaacatacctaagaaaaaccaaagcaagccagagaagactgcaataaataactaatccttcaatgcaaagacatagacatatatccataagaaatggagagaagagtaatatatgagaggatgctccaaaagaaaatatactaaagttgctgtttaataaattcagggaattaaaaataattcaaagatacatatccttgataatatgcaggacggtggtgtgtttgcagacatacaacttctttaaacagggaagtaggatcttctcaagctgacaaaagcaaggaaacagtgagtgaccctaacaagatggtgataggtgaactctatgaccaagaattcaaacagttttaaggaaactcatgatcaccaagatagtacataagataaattcagacatttctcaacagatttaacaaagagattaaaatggttcaagaaattaaaaaagaaatcttggatctgagaaatacatctgctgaagtgaaaaattcattagaggctctcaatagcaaactagatcagaggaaagcatcaacaaacttgagacaggctatttgaaaatacagagaggtggggataaaagaatgaaaacaagtgaagatcacctacaaggtatatagaaaactacctgaaaagacaaaatctaggaattattggtgttcaagaggaaggtaaacaagagcaagaggtagaaagctttttaaaagaaagattaacagaaaactttgtaaaatgtaagaaacagagaaatatccagatatagaaaggtcagagaagaccagatttgattaaaataagattattccaaggcatataacaatcaaattcttaaaggtcagtgacaaagagaggatcctaaaagcagcaagagaaaagaagcaaataacatatttaaaagcttcagtttgtttggcaacagtctactcaacagaaaccatacaagctaggaggaagtgggatgacattttcaaagtgctgaaataaaaaaacaaatgccatataaaagtactgcatacaataaagctatccttcaaatatgaaagagaaatgaagtccttcccagataaaaagctgaagtaatttaccactatgagacccatcttataagaaatactaaagagagttcttcaaactgcaagacataaaaaactaatgcacagaaagaaaacatttgaaagtaaacccactgataaattaagtacacagacaaacccagaatactctaatactgtaattgcagcatgcaatccactcatcacttcagtatgaagcccaaaagacaaatttatcaaaaacaatagtaggtacagcaacgtgttaagagatagacaacataaaaatatacaaattgagacgacataaagtcaaaatatggagaaatacagttaaattttagagttttttcattgtttctttgtttttggcaaccaagtacaataaccatatgatcatttcaatagatgctgaaaaagcatttgataaaattcaatatggctttattataaagtccctcaagaaactggatatagaaggtgcatacatcaaaataaaagccatgtatgacaaacctatggctaacattgtactgaactgggaaaaaatgaaagtctttcctggaagaactggaacaagacaaggatacccacttacacttttattcaacacaatactggaaatcctggtgaggcaatttgtcaagagaagaaataaagggcatccaaatcggaaagggataagtcaaattagccttgttaacagatgacatgctcttataattagaaaacctaaagactccaccaaaaaacctgttagaactgatgaacaaatttagtaaagttgcagaatacaaactcaatgtacagaaatcaatagcagttatatacaccaacagcaagcaatctgaaaagaaatcaagaaagtggtcccattaacaatagctacaaagaatataaaatacctaggaatcaatttaactaaaggagtaaaatatctatacaagtaaaactataaaatgctgatgaaagaaattgagtaagatacaaataaatggaaagatattccatgctcttggattagaagaattaatattattaaaatgacaattttacccaaagtaatttacagattcaatgtaatacatatcaaaagaccaattacattcttcacagaaatagaaaagtatttctaaaatttatatggaaccacaaaacacccagaatagctgaagcaatctgagtaaaaaaaagacaaagctggaggcattacactaccttacttcaaaatatagcacaaacctaaagaaaccaaatcaacatggtattggcataaaaacaaacacataaaccaatggaatagaatagagaacccagatataaatccatgcatttacagacaactcatttttaacaaaggaaccaagaacttgcaatgaggaaacagtctttttaataaatggcactgggaaaactagatatccatatgcagaagaatgatagaagagacagaagagatagacccctatctcttaccgcattcaagaatcaactcaaaatggattaaatacttaagtctgagacctgaaactgtaaaaccaatagaagaaagcattggggagatgctcccagacatgatctaggcaaaggcatttgtgtaagatctcaaaaacactggcaagagaagcaaaaacagaaaaatgggattacatcaggctaaaaagcttctgcacaacaaaggaaacaatcaacaaagtgaatagacatgccatagaatgggagaaaatacttgcaaactgtctatctgacaatgaattaataactgggatatataaatagcttaaacaactcaaaagcaaaaaacaaaaacaaaacatctgattaaaaatgggaaaatgatctgaataggcatttatattgcctattgcctattcagaagacatacaaatggccaacaggtatatgaaaaaatgttcatcatcactaaagagatgagaattgcaactcaaaaccataatgaaatattatgtcacccagataaaatggctttgataaaataaaaaagcaggaaataatggatgctggtgaagatgtggagaaaggggaactctatttacactgttggtgggaatgtaaatttgtacagccactatagaatattgtatgggggttcctcatgaaactaaaaattgaactactgtataatgtagcaattcactactgggtgtatatccaaaagaaaggaaaacaatatattgaaaagacacctgtactcccatgtttattgcagtgctgttcacagtagccaaaatatgaaatcaacctaagtgcccatcatgaatgaatggataaagaaaatgtggtacatatacacaatggactcttattcagccataaaaaagacttaactcctattatttacagcaacatggatggaactggaggtcattatgttaagtaaaataagtcaggcatagaaagacaaacattgcatgttctctttcatatgtgggagataaaaaagtgaacctcatgaaggtagagagtagattggtgattaccagaggcctgagagggtcatggggagagggagaggaagaatagattgattaatggatataaatttacagtttcaatgaagagataagacctagtatttgatagatcagtaaggtgatttatagtttacaatatcttttacatatttcacaataggtagaagggaataatttaaatgttgttagcataaagaaaagacaactatttaaggtgatggatatgccagttacattgatttgctctttacaaattatatgaatgtattaaattctcacatggaccctgaaatatgtacatctattatgtattgattaaaatatatttttttaaactccaggcttccccaagattgtaatccacctgtaatttaactgactgctagtaaagcctgttactttcagaggaaaacaattcaacctagagactttgcaaagtataatccacaatgttgtgtgtatgtgggctgtgtgtgtgtgtgaaggaatgagaaaatgtaacccaaacatttgagagagaaaaaaatgtgtgtagacatggtgacttttatcagaagttgtattaaggtatcttaaatttcagttcctattactttaaaatctaaaaaaaactataacagttatttcatgaacaaatctaccaaaaaaaattcattcaaatatttgcaatctgtttatgtttatgcatgagtgcccaaaagtatcttcagctctttttctccaatatttaacatttattcctgggattgaagaatgttccttctattttactcttaaacatcaaagcaatgaaactattaatcccgctaataatgatgcatatttctcaaagatgcctttcattttcagatcagcaaccaaaggagtttcaattgtctctccagttggctctaatgagagatgtacagatgttaaacccaatactcttcttaatcattttccttcgtgtacttgattaaatcctcaaaagcaaactgttcatgttcttgccgaaaatataggcggtctcacttaacagttatgttgcacaagaaagggaagttataatggcatggaacgtgctctacgtggtattttctagactttactagttcacgagcttttgtggataagtcaaactcttgaatgtcacttaaatgtaatcttttctgtagttgattatgcagagaatacaaaaggtatctgcagaatgtggaattaattttgaaagtttgataaaaacttcagaataatagctgtggctgtacaagtcatctatgaaactgttctctcataggtgacattaatttcctatctacagagttttattactgaatgtgttatgtttgtacccccacaaaactgaaataatagttttctttttttagcagtctatgaaaatgttgaggtttatcttgactgccgctttttaacataaatatttgggcttcattgaattcctaatatgtgatgtcacttggaattctgatagggtccagtaatttggcctgcaaagacatattttaccttaaaatgaaagggatagttgaaatgttattttacacgatagcaaaaaagcatccaacataagttgtgagatttttattgcttaacttttgaaatagaaggacaaggttcttatgtgcttgctttattccaaagtatatatgggaatgctaatgctttatatgtaaaatgtacgctacacatatttgtgattagttaatttttatggctagaaattctagaatcataaaaaagaactaatcttgaatgtcagagcttcacctatttttttaaaaacaatgagaacaaaaaaatcattataatttttatatttaccttgtgtttcacaaaaaggaggttttctttgctgtgctacactgcaagaatatgtcatgttcaaatctctggggctttattaaaaactttaactactgtcttcttatagagattattaagcaaatactaaagatagcatagatgtgtggtctaggcagtatttttctggcaagtagacctaagtgcagaatttaagttctgtaacattaacctgagactaaatcattttattcagggttgtctcctctgtgaacagctttatgttatgacctcatttgctacagcaaatgaaatattaatagatcattgaaaatgcagtaaagttttgatcagatgttataccttcattgtataccaaaccctgcctctcataaaaactttctacttgggtttaaattgaaattatcactcaattttttaaaatcaaacattttctttaagaacatgacaatgtaaacatatttcttacgggaatctttaagttctatatttttcaccaaaaatcatttcagaccatgctagttaaagagttattgaaaaaaaaaagaatctatttagatgagtcaaaaaattaagcaaagtatgttttaaataagttagtgactataaaatttctcaatttgggcatttattttgactgcaagtaacaaaacacctgacaaaagagacttaagtaaatagctctagatatatagttgactcttgaacaatgcaagggttaggactgctgatccccacccagtcgaaaatctgcatataacttttgactgtcccaaaatttaactactaatagcctactgttgaccagaagccttaatgataacataaaaaactgattaaaacatagtttgcatatatatttatactatattcttaccataagtaagctaaagaaaagaaaatctcattaagaaaatcataaggaagagaaaatatatttactattcattaagtggaagtggatcatcataaaagtattcatcctcattatcattatattgagtaagctaagtaggagaagaaagaggaaaggttggccttgctgtctcataagtggcagaggtggaagaaaatctacatgtaagtggatctgcacagttcaaatttattttgttcaagagtccgctgtggatagttgttggcattggtgaaccaatgccaaatataatggcggcatctttgtgattgttttggccttttcaaataactgaaagatgattgctgaagttgtagacatcatgtttagcggaaagaaagagaaaaggagaaggtggcagctctttcaagaaagctaaaatttcctaggaacctccataggagtcccatcatggtgttcccgtggcatctctgagcagttatgtttcatatcacaactcctaggtaaagtaaggcaaaggagaagcaggttagaagtaggcattaagttgccacatgttctaattgtcaccttgtttaccaagtcatgtatgtcttatctttgcttaccaaacaaaatgctctgattttcttgattagccatagtgacacttgcttcttgtctttgaaactgaaagtaataaaccacctcacgccatgtgttattcttccaaaagctaacataattttgattgatttgaaaatatatgatttcatatataaacatatataattatatatatatattagtatctattgctgccactttttacttaagactgatagcatcaatgttaaatagtgtcttttcagaagtattgattattctctctgttgcagatctcttcaaattgattgggtgtctccacggaagccaaatggcatcattcttggatatgatctcctatggaaaacatggtatccatgcgctaaaactcaaaagttagtgcaggatcagagtgatgagctctgcaaggcagtgaggtgtcaaaaacctgaatctatctgtggacacatttgctattcttctgaagctaaggtaagtcttttctaactaatcagtgaaccatgtttttctcactcaagactccaagtgaaattattagcttctcacaccatgatgtattatgatcaatatttccactactctatgaagaagactccacggaaaagaaaggatgcttacaaaaatcactatcaccctcatgagcactttagccttcccattttttattatcttcacaagaaatataaacttattagaatagggtacatcccaaattttatttgattgagtgacttaaaattttctttacaacagatcttttcagctacaaataggtgtttgtttatatggcactgatgagtaactgtgaggaggacattttatgatttgtcagaaatattttagcattatagtcatttgtagattaatgttcatattagatgcggtttagaaatcagatcaataatacagccagacagaggagtttgtaaatgacttttattgacaaacaacacaaaatccttagtttgaaggtagaattttatataatgaaataatgttcctatttggcaacaacagcatcacacattcaatggctaaagctactactaaatttataagatttactgcaaaagaacaccataattaagaaagtgagttactgaagcaatatggatcaaaatacaaattattatggctgacacaaatttagcaggagttatcatctaagaaatgcataaagccagcagttactaactgtgcattttttgatacttagactctaaaattatcattatgcctacatttgacatcattttatgccattaagtatgcacatatttaaatacacacatctgatgaacatatttgtataaaattaaatttgggatttctgagaagaaaaatactaaaataaatttgcccattaaacatatcctccacttaagaaaaacttgggaaaatgttggcaaaatacggaattcacttctcaatttttttctttgcttctattattttaatatttattatctgttacgaagtggacaaagagagaatagttgtataggcatacgaataaatgatttaaagtttgtggagtgcagaaaacaatgtgttccatcaaagtaaaaactgattctggccagaaactgtcatagtagtttaggtgtgtataatggatttgataagtttcaaccctataactttagtggcaaaatcaaagctaagtagagtaaaactagtaaagataatgtttccatttaagtttattctaaaagatcaaaaggtggatgttcttaaaatgttcatattaaattagaatatacctgagatagggtgaagaaaaagtaatgggatgaagaaaaatattaataaagtattaacagaataatatttacctatgtttaggctaaattatttataaaattactcctacctttctttatgctgtgatttcagaaaccgctttttgtaacttttaaaaatttactgaagctttgtaccaaataagtgactggttggtgtaacattcctaaattcagtgaatgacaaagaaccggttagtttaattttaaatcaatttaaaaatgatttagacaaatctactctacaaaaaaaaaaaaatcatacgggtcaccttttatagaaaataaatgtaaattgatgaatagggaagcaaaagttaggctttagaaaacaggcgtgtgcaaatctcaccacatagtcttgaaaagaaacatcacatttggttattcttataatgcaaatgtcataccttattacactaaaacgagacacactatttaatgatgccttaaacaaagtcttatttttattgttgagcttaaagaggcaacacaggtattgcggtaaaagagaataaaggatgtcagttaaatttcaaaaaaaaaattgtaaagttcagtttgggactaggtactaatacacatttcctagcatgaaagattggagagaagtagaaaagagacttgtattgcgggtttaaaagctttttggctaaatcactgtaaacatcaatgtttcccaaaatacttaaacaagctttaccataagattacagccatggttcacaaatcccagtgaacgtaagacctgggggaattgttaaaacctaggatttcatagctctagtcccagagattctgattcagtaggtttagatttggctgtgaaaatttgcatttctaaacatgttcccaggtgtcttagttcgttttcacagtgctataaagaattacctgagactgggtaatttatgaagaaaagaggtttgactcacagttctgcagacttaacaggaagcatgactgggaggcctcaggaaacttacaatcatggcggaaggtgaaggggaagcaaggaccttcttcatgtgatggcaggagggagagagagcgaaggggagagctgccacactcttttaaaccatcaaatctcgtgagaactcactcgcctttagacctacaataaaagtctctttcctacttctctccaatctttcatgctagaaaatatatattcatacctagccccaaatgaaatttacaattttttaaatttaattaacttcttctgttgtctttcactgcaatacctgtgttgcctctttaatcccaacaataagactttgtttaaggcattattaaaattttatataataaaaaatgtatatatttaaatatatctatttttattataaaattttatataataaaagatctatatcttatgtatatatacatatgtgtatgtgtaagatataagatatacatcttatatcttttattatataaaattaaaattttatataataaaataaaagatataaaattaaaattttatataattaaatacatattatattatatagtattataatagagcacaaagcatggttgaagacttcaaaaaagctgcattctatcaaataacatttataaaattcgaatgatcctggaaaatacatttttaaaccaacgaaatatgagtaatatggtctcagatcttctatgccttacaagaaaataattatattacatgagatacagtggtataacactcttaactaaactgatatttctttaaaactgttttcaaactttcaggtttgttgtaacggagtgctctataaccccaagcctggacatcgctgttgtgaagaaaagtatatcccgtttgttctgaattctactggagtttgttgtggtggccgaatacaggaggcacaaccaaatcatcagtgctgctctgggtattacgctagaattctaccaggtgagggttatttccaggtgtactcaaaaactatgggaacctgaaaacataaacacgtggttcatgtcagtgaactatttcaaacacctccctctcaacaaaaattgaaccataaacacatagccaatggcctgctctaaatattgtttcttccttctgctttgttaaaatataagcaaggctaaatattagaaaacgagagaacagaaggaatttacaatatctactacagaaagaaataaatctggagatctggctaactccttttatcttgtggctttttttattaacatgactatatattttcactattaaatatgtgaattgctgactgttccaccccatgaagctgttccccacttcctccatttctaatctgaactacacatgcattgttcttggatagatcgcaactgcaaatttcatttgtctgagaattctaggccactggcaatattctctcatcataagtcaggcaagggaaggaagaatgctgcaaagggtagcaaactggattttttccttcatccctttttagtattagccaacttagctagccattttgctccaaatttcaactacataaaacaatgcctagtgaatataattgggaatgatgctaataataactgccatttttaaagtaccaagtctctcgcaggctctgtattgaagactttacatgggataccttatagaatcttcacaactccaggaaatttgtattatacaaggcagtttacaagtaaggaaactgttttagagaggatcaataacatatccagattcacagatgtgcatagaagtgaaagaactaaaatgtgaatataagtatgtctctcctaaatctatgctcttttgtgtactttactgcctctttaaccaaaaagcatcaacctcttttgacaatttttttaaaaggactatttaagacttctaaacttcttcattactaccactgtcagttacaatttatcctgcaaaagtaattgagaatacaaaagtaattgagaatacaaacttttttctactacttaagtttgatactgatatcttctttaaagagcaggaaatggatataggagaaagacaagaaagccaagttttttggaggccataggaaagctgaatactttgagatatctagtttagggtgaaatttatgcccaacgtctggttcctgtaaattatgttcagtataactatatccatccaaggcatgtgaaatgagacactgtctaacccagtgtctgttttgcaaaatactggagcaaatatagaaggcgtgcaatcacctgatgggttcatcttgcccattgcacagatagagccaatttaccaaaacagtggtattgcaacagagaaagagcttaataaatgcagagccagctaagcagaacaggaggttttactcaaaacagtctcccagaaaattcaaaacctagggtctgtctgggcacggtggctcatgcctgtaatcccagcactttgggaggctgaggcgggtggatcacctgaagtcgggagatcaagaccagcctggccaacatggctaaaccccatctcttgtaaaaaatacaaaaaattaactgggcgtgtggcaggctcctgtaatcccagcttctcgggaggctgaagcaggagaattgcttgaatctgggaggcagaggttgcggtgagccgagatggtgccactgcactccaacctgggcaacagagtaagactctgtctcaaaaaaaaaaaaaaaaaaaaaccctaggggtttttttggttggttttttgtttgtttttgttttttgtttgtttttttatttgtttgtttgttttgagatggagttttgctcttgttgcccaggctggagtgcaatggcgtgatctccggctcactgcaacctccacctcccaggttcaagcgattctcctgcctcagcctcccaagtagctggaattacaggcatgtgccaccacacccggctaattttgtattttcagtagagacaggctttctccatgttggtcagggtggtctcgaactcccaacctcaaatgtctgcccaccttggcctcccaaagtgctgggattacaggtgtgagacaccacacctggcccagcctagggttttttttaggatagtgcagtaggcatagggctagggaatgaggaatgcttattggttggggataaaattatagggagtcagagctgtcttcttgtccttagtcagttcctggatggggactataggatcagatgagccagtttactggtctgggtgatactagctggtccctcagaataaagagtgtgaaaaatagctggtccctcagaataaagagtgtgaaaaatacgttgaacaccaatcttaggttttacaatagtgatgttatctatggaagcagttgggaaggttaggaatcatgtggcctctggtgccatgaacacctaagccgtagttccttgtggctaatttgttaattttataaaggtgctctgccccccaagcaaggagcaagtttgtttcaggaaaggactatcatcagtgtttcgaagttaaactaaacacctctcatagttatcttggcctatgcccaggaatggacagggtagcttgtaggctagaagcaagatggaattggttaggtcacatttctttcactgtcataattttccagtgtcaggattttcttactgtcataatttttgcaaaggtggtttcaggtgtcctgattaaatactgctcaagttttctcaaggcagagaaccttcactcattatttttccttataattaatagaaaaaaaaagtttgtatagcagtgctgttatttcttattctctatcaaaaatatttcaaaattgaataagttctagtaaaccagattttccacttaagaaaaagtaaaaatatatatggaaataaggattttgtagaaaactgttaaacttcttcatactacagctcacgatgtcaacaatggatcaaatactgttaaatgctttactttctcgaagtaacttaaatttggggagttttcatgtatgattcatatctgcccttgattacaaatcattgctataaaattataattacagtgatcagatggacgttttgtgttgttcaattcctaccattcttcacaccagtagaccaagttgatcatggaactaagtaatagtgttttcatttccacatcacattaaaatttttatgttatgatttgcaacaaactattcaaactctacaaaatatcctctgtcccttaaaactaatgaaaaattcttagttacatcttcactgctgctaactcaggagactggcctgtgactttctcaatgctaacataagtagtcagattttgaaccgacagcacaatctacttttgttaggtttcaaaataaaatttaacatttttcttaaaaatgaaataactcatggaagctcagaagttgtcattgatattatataagcctttaataattaatttttagaccaaggatttaaaaaatatgtattgtctgtatgtataaatacatgtttctgcacacctaaagcattttaatatctaccaaaccattgagcatgccccaaattttgattcttttttaaatagttcatttttcatagcattagaatgcataccctggtgtcaagaaaaaaggaaaaaagcaatctcatgaaataatcaaagagtgttttgctccaatcattaatcccactgtacctaaatgaagagattattttgtgacctctgtcctcagccccgtggtctttgttagctagtttaacactggttacactgagggggaaaaaagcgcaatggtcccaaatcctgttgcatctaaatgtgatttaaatctggtcactagtctgccagttcaaggccaagatgggtataggcattttgatatttatggattagcctgaaatattggtaaatacgtactttattttttttctcatgactttcttccataacaccccataacaaacagcagaagaggaaagaatgctcatttctctcccttttttaataaatatgctaataaccccaagtaaatgttaatgtgggtcattctttgataagaataacaattaactgttagactgcatggtagtttttagagagaaaacattttcaagcctggcctgaaatagattcattttgagaggttaatgagaaggtgactgatccttgtatcttatgtctaatagcccctttttgaggaaaaaaaaatagttttattttttattgatataatccacatctttttttttttgaagacttttcttctgtcagtaactaaataagattctgagggattcagaaagacatagctaaaatatctaaaccaattaacatttattatgctcaaaagaggctttaaaaaaaagtattggctttcgccatgtagatgtgtatactatgtttcctctaagctcaccattgtcctgagtggtgtttaattaactgttgttgccctgtaccatgggatacattatcttaaagtttaccatagagggacattatgttctttgactgtgaagacaaaaaatatggcaactacatttcagacgaaatagaattattttacccaggggaagataacaaatacagtaactttactgtttacaataagctcgttgctccttcattggtctctggtagcatcatcatggaaacttttactaagttccctttttcttagagataccatattataggatcctttcaaagataattgactaagccaactgtctcctgaattctagaaattcatattttgagaaaatcctgagtatgtcttgatccggtcctggatatttaccctagagaaaagcaaatttatgtttacacaaaaacctgtacatgagggtttacagcagctgtaatcattactgccaaaacctggaaacaattcaaatgtccctaagtgagtaaatggacaaatgtggaacaaaggaatactatgtagcaataaaaaagaacaaagtattgataagtgccaagaagatatcaagcccagtgaaagaagccagtctcaaaaagctaccaactgtgagactgcatttacatgacatactatacaagacaaaccatagttttggagaaaaaagttgacaattgccaagggtaatggatgggaagggaatgtgactatacagggatagcgtgagggtgttctgtgggggtgatgaaactcttttgtatcctgatggtgtttcttcattaaaattcatggaagtgtgcacccaaaaaaactaatggtcctgaataatatttttaaatgaaatatttttaaaacactatttccattttacacataggaaaaatgggacatagaaacatgaccaagacactcagctagtcaaaataggaattttcatggttaaattttaggttgagctcctagagatggtgtgttttataataatgtgatgactgtgtatgagtgacttaatatatttttctcatatgttagtagaacagtaagatagcaaatatatttccattaaaattacaatgaacatccctatctttaaaagaaagcaaaaatgtcttagtcagtgatgactatttcaagtaatattttacatgatcacattcttatgaaagcataagttttgtgtagtgtttccgtggtttgatgctgaataattagtgaataagatattggttctggagtcaaactgcctggctccatatcccatttctttcacctcttagttgtttgaccttcattaagtaactttaggaatattagcagggtattaatgtttctgatgtccattgggctgctgagttagaatactcaaagctaaccctatcttttatatctaaatagaaaaaaaatgtttagtaattgaggagcatatgagtaaagagggctaacaggcctcctttaaatgacaaagtttctaatgaatctttccagagcaaggactcaggggtgtccactttcatcagatcatgtaaagggatagccagttcccaaaagctaagattcaaacatctaatgacctttgagatcctatgaaacaaaggatccttgttgatcctatgaggccaagcaattctctaagttgacttttagcaactagccagggaaagtcatgaagagcttccaaactttgaagagaaaaagactttccattttgcaaaatgtcacagcctagaatttaggtcctagaaaaagcattttgttctgacaaaattgacatttagagactttatgtcgattgtatgctaccactattgacaaatagagggaatcaatttttcaagtctatctggagaacgtgacagatgatcattcacatattgcacaacagttgaatcttataggggaaattaaatatcgctcagtttgtttcctattgctgctataaatcatgaccagacacttcgtggcttaaaaccacacaaacttactttatacatccaaatatcaaaagtttgaaatgggtctcattgaactaaaactaagaagttaacaagagctgcattcccttctggaggagagaatccattttcttgccttttccaccttgcagaggctgctcacattctttggcttgtggaccccttccattttccaggccagcaatgaccagttgagcctttctcacttcatattattaaacttaatcacatctgttgtcttcattcccctttgccatgtaacataacatagtcacaggttccagggattaggatgtggacatcttagggaggccatgttgtgcttaccatggtaaggtaatggttaagcagttgtgagaattaagaaagcattgtcgtaaactcttggggaataactgtcacaagtgaaacaaaaaaagatactgtgagcctgagtgcaagaatatatgaaaaaaatgctaagtatagatttgctataaattaagcagctgcctcagggagtggcagtaggatgatattagggttgggaactacagggaaatgggggagtgcaatcttgttaatgacacttaaatcttgtacaaagtggtacacaagtcttttatcattttgatagagtgaacagtgaactacaaggactggtacaggggataatggggtgttatgccaagcgaggtaactttctagaggtatgtagatacaatggaccaagttattaaatattgttctttttagtagattttgggacagtttcaagaaatgcatagccagattgatagacatctttaaggggttagcatcctgtatgaatcccacatctgagcagtttttgccccagaggatcttggagacacattcaaagtcagagatgttgataacaaaggcatcaggtaattagctggtgctaccaccaaattataggccaggcattcttctcctgggagttacagaaagagactttcaggtgcacatttaatgctggtatctcatttacaaagtggatctcttctcaacagatgcactgaagtggaattactaaacaaaaaatatgttgattcaagagaaagaaaagaaaaataaaggcagaatctgaaaattatttgatatgtgtaccgctgagacatttggttattcctagaaagggataatggaaaattagaagggtttttgatagataatatacctaccaccagtatcaatcttctatttttacaattgcatagaaatttctcactttctatgtcaagggcagttatggatagatgagagcagctactttcacagagaggtgctgttttgtcagtttgtccttttttttttttttttttgattgtgtctttctaagatacactaataaaggcaaagtaggtgttctcccagtgtcccttacaatattgaaagttgtttttgtgcagactagacatagaggtgccctcattcttggctttatctaattgcttaatcccaaaagctgttaatgtggtctgaattttttttctttttttctgagccaaagtatcttctaagtgcttagcaagctcttgtaatttagaaggaagggacaatctactgtcttatcttctgttttatgggaagttatgataccttcttcactgatctttagagtattctggaaggtggtagttaagtgatctctgaagccaggcatggatttattttttccttgtttacaggacttttttgtggtaaagtatacaccacataaaatttatcattttaaccattttttaagcacacaattcagtggcattgagtgcatttgcattgttgtacaatcattaccaccatccatctctagagctcttttatcttctcaagctcagactctgtttccattaagcactaactttccactccctgttatcttcaacccctggaaaccaccattctgtttttggtctctatgaatttgactactctaggtacctaatataattggaatcatacaatatttgtctttttgtgtctggcttatttcacttagtgcattttctttcttttttttttattatactttaagttttagggtacatgtgcacaacgtgcaggttagttacatatatatacatgtgccatgttggtatgttgcacccattaactcgtcatttaacattaggtatatctcctaatcctatccctcccccatctccccaccccacaacaggcccctgtgtgtaatgttccccttcctgtgtccatgtgttctcattgttcaattcccacctatgagtgacaacatacggtgtttggttctttgtccttgcgatagtttgccgagaatgacggtttccagcttcatccatgtccctacaaagaacatgaactcatcattttttatggctgcatagtattccatggtgtatatgtgccacattttcttaatcctgtctatcattgttggacatttgggttggttccaagtctttgctattgtgaatagtgccgcaataaacatacgtgtgcatgtgtctttatagcagcatgatttacaatcctttgagtatgtacccagtaatgggatggctgggtcaaatggtatttctagttcaagatccctgaggaatcgccacactgacttccacaatggttgaactagtttacagtcccactaacagtgtgaaagtgttcctatttctccacatcctctccagcacctgttgtttcctgactttttaatgatcgccattctaactggtgtgagatagtatctcattgtggttttgacttgcatttctctgatgcccagtgatgatgagcattttttcatgtatcttttgtctgcataaatgtcttcttttgagaagtgtctgttcatatccttcacccactttttgatggggttgtttgttttttcttgtaaatttgtttgagttcattgtagattctggatattagccctttgtcagatgagtagattgcaaaagttttctcccattctgtaggttgcctgttcactctgatggtagttttttttgctgtgcagaagctcttgagtttaattagatcccatttgtcaattttggcttttgttgccattgcttttggtgttttagacatgaagtccttgcccatgcctatgtcctgaatggtattgcctaggttttcttctagggtttttatggttttaggtctaacatttaagtctttgatccatcttgaattgatttttgtataaggtgtaaggaagggatccagtttcagctttctacatatggctagccagttttcccagcaccatttattaaatagggaatccttttcccatttcttgtttttgtcaggtttgtcaaagatcagatagttgtagatatgtggcattatttctgagggctctgttctgttcctttggtttatatctctgttttggtaccagtaccatgctgttttggttactgtagccttgtagtctagtttgaagtcaggtagcgtgatgcctccagcttttttcttttggcttaggattgacttggcagtgtgggctcttttttgggtccatatgaattttaaagtagttttttccaattctgtgaagaaagtcattggtagcttgatggggatggcattgaatctgtaaattaccttgggcggtatggccattttcgtgatattgattcttcctacccatgagcatggaatgttcttccatttgtttgtatcctcttttatttcattgagcagtgctttgtagttctccttgaagaggtccttcacatcccttgtaagttggattcctaggtattttattctctttgaagcaattgtgaatgggagttcactcatgatttggctctctacttgtctgttattggtgtataagaatgcttgtgatttttgcacattgatgttgtatcctgaggctttgctgaagttgcctatcagcttaaggagattttgggctgagatgatggggttttctagatatacaatcatgtcatctgcaaacagggacaatttgacttcctcttttcctaattgaataccttttatttccttctcctgcctggttgccctggccagaacttccaaccctatgttgaataggagtggtgagagagggcatccctgtcttgtgcccgttttcaaagggaatgcttccagtttttgcccattcagtatgatattggttgtgggtttgtcatagatagctcttattattttgagatacatcccatcaatacctaatttattgagagtttttagcatgaagcgttgttgaattttgtcaaaggccttttctgcatctattgacataatcatgtggtttttgtcgctggttctgtttatatgctggattatgtttattgatttgtgtatgttcccattcatgttgtcgtacgtgtcaggattttattcctttttaaggtcgaataatgtctcattgtatgtatataacacttttgtattcatttattcatcagcggacattggggttatttctgcctagtgactattatggttaaagctgccataaacattgatgtagaaatgtacaaatttctgttcaatctcctgttttcaattcttttgggtttatacccagaagtggaattgctggatcatatggtaattctatgtttaattttcatgttaagaactgccatactgttttgtggaacattttaacattttatattcccaacaacgcataagtgtgccaatttctccatattcttactgtttattattttatgttttttataactatcctaatgagtatcaagtggtatctcattgtggttttgatttgcatttccctacttattactaatattgagtatattttcatgtgtttattggctatttgtatgtcttctttggaaaaaagtgtctattaaagttatttgcccatttaaaaaataaggtctttgtttcatgtttttgagttatagaagttctttatacattctggatactacttccttatcagatatataattttaatatattttctcatgagttgccttttcactttgttgacagtgttctttgatgccaaaaagttattaatattaattatgatgaatccaattcatcttttttccttattgcttctgctttcagtgtcatagccaagaaatcattggcagacccaatgtcatgaaatttcccctttgctttcgtctaagaattgtaagttttagcttttacatctagatctttgatccattttgagttagttttggtatatggtataaagtaagggttcaatatcattctttggcatgtggatattcaacttttccaacattctttaaaaaaaaaaaaaggtcctttcctcattaaatggtcttggcacttttgttgaaaatcatttgcccatatatgcaagggttcatttttaggatctctgttctatcccattggtctatgtgtctgtctttgtaccagtaacacacttttgattactgtaactttgtagtaagttttgaaatcagaaagtgggagatctccaactttgttctttttcaatgttgttttgactatttgcagttttttgagattccatgtgaattttataatggcttcttctgcttctgcaaaaagcattgggattttgatagggattgaattgattctgtagatcacttgagcagtactggcaccttaacaacattaaggctcccagtccataaacatgggatgttcttccatttggttatcttctttaatttctttcaacaacattttgtagtatttcagtctttcgctttcttggtaagctcattcttaagtctttctttttttgatgttattgtaaatgaaattatcttattaattttattttcatgttgttcattcttagtgtatagaaacatacctagtttttctatgctgactttgtatcttgatactgtgctgaattgtttattagttgtaacaggttttttttttttttagaatctttatagttttctctatatgatatcatgttgtctgagaacacatagttttgcttcttccctttcaatttagatgccttttatttttttctcttgcctattgctctagccataatatccaatattatgtagaatacaagtggcaaagggtggcaaccttttcttgtttctgattttagaggaaaagttttccgtctttcactgttgagtatgacattaggtataggtttttctcatatactcttgattatgttgaagtagttttcatctattcctattttcttgagtggatttataatgaaagagattgaattttgtcaaatatttgttctacatcaactgagataatcatgtgtttcttttttttcccctttgttctattgatataatgtgttacattgattaaattttcatatattgacccatcctggtattccagggatatatcccgcttggtcatgttgcagaatcattttgatgtgcttttgaattcagtttgctagtattttgttgaagatttttgcatcaatattcatgagagctattgattttaacttttttcttgtggtttctttggtaagttgtatgtttctagtaatttgctcatttcatctagtgagatggatttttggccaataaatttggaaagaaaagatctcaaggatagctgctgagagttattgtcttattatttatactccttatatatctatgtttaattaaatattgtcccatatttttatatcattttggtaaacagtacatcttgcttttactaaacaaattttaggatatccagggctcaccaaaaggtgaactaattgagaagaagtccaggactataaatccctaaggcagtcctaaattcttcagtggatttgtgccatttcttaagaaagcttgacaagtcattaattggattatagaaatcttacctggaccatggttgaaggccataagacccatcagattggtcatcatactcacataccttataagatataatgaagagatgttgtccaggggaaaagatatgttcaagaaagaacggtagagaaaagggaagaaggtctgttgaaggtgtaggaagaagaggaggagcaggacaaaagagagaaggaagtcagggttccgaaggccacgagggaagacaaccacagtggggtcatgagatagagaagagaaatgaagcttggatttcagatccaccaagtttttattagttcttttgaaggtatccttaagggaagccatttacaaaatcttctgtcctttagagttgtctttataccaaacaaacaaacaagctaactcttggtatttagagtatttgagtcctttgattttaaggtaccaggcaaaagattatctaattctgttttttgttttttttgtttgtttgtttttgttttttagatatgcccaggctggagtgcagtgaaacaatcctggctcactgcgcactctgcctcccgcctcccgggttcaagcaattctcgtgcctcagcctctcgagtaggtgggactacaggcatgcaccaccaagcctggataatttttttatttttagtagagatggggtttcaccatgttggccaggctggtcttgaactcctggcctcaagttatccacccacctaggcctcccaaagtgttgggattacaggtgtaaagcaccacacctggtggattatcttattcttatcccaaatttcccagactgtcatgtgaagagaaatgtagtaaaattcagtgtgtgacatagcccagagaagtactagcacactgacttaaatacagtattttttacctcctctcatgtaattaaccttcccaatgggagtattttgtttggttgaacaaatatagtttggtcaaggaaattatagtcataagcaatataaatttatcaatagttggtttttgaatccactctacgttccaaaagaaaattacacagaacaaaaaagtattcctagatgtttttctataatgccacatagtccatgtcaccagacctgatggtgaggaaatagacaacatagacttacctgtaagttgccatgtgtgtatctgatctgacacacgtttatacacaaaaactttggagtcatttggaaattttgcaactccaatatgatattattctctttagtaattctgtcaatcagttgggatctgcaagatgattgtgataaaagttaattgttagtcatagcatatttttttaactgatgtaatgattattattgtcctaaattgacaggtgaagtatgctgtccagatgaacagcacaatcgggtttctgttggcattggtgattcctgctgtggcagaatgccgtactccacctcaggaaaccagatttgctgtgctgggaggcttcatgatggccatggccagaagtgctgtggcagacagattgtgagcaacgatttagagtgttgtggtggagaagaaggagtggtgtacaatcgccttccaggtaaggggcccaggtctacctttcagtagatggaggatctgagaagcagagagagtgagaaatttgccctagaaataaaacaaataagtaattaaagctcacattggttatatctaatgcaataattaggaacatattgtttaacacataacaatgtaatctcccaatttttacatgtatctcatgtatttcataaaaacgcatcaattttttttcctcttgaaaaggtcatgtcctccaaaaaaaattccacacatgaatgcattggttatgaatgaaaagaatatttcctagcaaatagtatacaaaattattataatgatattttgttataattcttttactcccttattctactgtattaagctaacactaatataaataacaataagtatcattgaatgaatactaacagacactgtgccaatattttatatattattacctcaaataatcttcacaataatcttacatgataggtactatcaattatctgcattttaaaaatgaagaaactgaagttcagacattagatattagacattatcttgctaaataccacacagtcagatccagattttgggaagcctgacatttatgttattggaggtggggcttttaaagacaagaaaattaaaatatgaagttaatgttcacagtatcttcaccaggcatagattccatctcaagaagccactttctttgctcctccctaagaagcaactcctcatctgttagttttatgattgcagcaattcagttacctcttcaggcttcacttctcattccagttctcttgctatttccactgcatctgcagttatttttcccattttgagtctaaaaccccttagtcatccatgagggttggaatcaacttcctctaaactcctgttaatgttgatattttgacttcttcccatgaatcatgaatattcttaattgcatctagaatggtgaatcctttccaggttttcaatttactttgtccagatccatcagaggaattactatctatggcagctatagccttacaaaatgtatttttaaataataaaactggaaagtcaaaatgactacttgacctatgctgtgttaataggcatgtaaacattaattttcttgtctatttccatcagagctcttgagtgaccagatgaattgtcagtgagtattaatattttaaaagaaatatcttttttctgagcagtaggtctcaataatgagcttaaaatacatagtaaaccatattgtaaacagatatgtaatcatacagcctttttgttccatttacaagcacaagcagaatagatttagcataattattaagggccctagagtttttgcagtggtcaatgagcatgggcttccacttaaagtcaccagctgctttagccccccagcaggagagtcaacctgtcctttgaaactttgaaaccaggcgttgactttttccctctacctatgaaagctctagttggcatcttcttccagtacaaggctatttcatctacaatgaagatctgttgtttagtgtagccaccttcatcagtgatcttacctaggtgttctgggtaacttgaggcagcagtttctacatcagcacttgctgcttcaccttgcacttttatgttatgaagatggctttttttcttaaacctcatgaaccaacttctgttagctttcatctattcttctgcagcttcctcatctctctcagccttcatagaattaaagagagtaagagccttgcctggactaggctttggcctaagggactattgtgactgatttgatcttctatccagaccactcaaagtgtcttcatatcagcaataaggctgtttcacttattcataagtgaatgataagtgaaatagaaatcttacctggaccacggttgaaggccataagacccacaagatttgtcatcattctcacataccttataagatataataaagagatactgtccaggggaaaagatatgttcaagaaggaatggtacagaaaagagaagaaggtctgttgaaggtgtgggaggaagaggagcattttgattttcttcaagaactgttcctttgcatgcataactgggctaactgttgggcatgagaggtctagtttttggcctgtcttggctttccacatgccttcctcaataagcttaatcattcctagcttttgatttaaagtgagagacatgagactcttcctttcacttgaacacttagaggctattgtaaggtaattaattggcctaattttaatattgctgtgcctcagagaataggaaggcctgaggagagggagaaagataaaggaacggctggtctgtgaaacagtcagaacacacaggacgctcatcaactaagctttccgtcttatatgggcaaggttcatgacacgctaaaacaattaccatagtaacatcaaaggtcattgaccacaaatataaatataaaatataaaaattaaaaatataaaaatataacaaatataataataatgaaaaagtttaaaatattgtgagaatcatcaaaatgtgacagagacacgaagcgaacacgtgctattggaaaattggcaccaatagacttcttgatgcagggtggccacaaaacttcaatttgtaaaaaaatgcagtctctgcaaagtgcagtaaatcaaagcacaataacgtgaagtaagcctgtgatactaaactactatatgcctttttaactcttattctctcctatgtgtacagcagagcttttcagatgttacatggcatgatttgcaacagatcgaatgcagactcagaaagaaaattaaattgacttctcttaactaaacatttaaaaagcttgcaaaaatataacacaatgtcattcttctattttttatttgaaaaacatttattttcataaatatgttagaatgttatagatttattattttatgtctaaatgcattaataaatatttcaaaaatttctgccgtaagttttaacacagtacatatcaacaggtaaaacccatataaacaaaaggtatttggggtcctcaataattcgtaagcgtataaaaggatcctgagaccataatttgagaaccactgcttaaagtcatagtaacgtctactagaaaattatggcaactaattagttatcctgtactatgactaaccagttgaatacctcctcctcctttagatgaagtagctaataacaggtctattaaagatagaaccaaggtggcagggagggtgcaaaagtgttacctcctgtgtactctaatacatcagagtttaaaaatgacagcaaaatatttgattttagtgtgtttgttcatctgtagctttttaaaagaattagtcaactgctatactccgtcctttgttaaatatgtattatgtagtaaccatattcaagacatcattcttggtgctttgcaagtgtaaaaatggccaagattccgtttttatcctcaagaacttacaacctaatcaaggagaaaagtgcctacaaggttatacacagaccataagagagggatgaatgcatgcatattcttaagacggagagatcactccagtcaaggtaatgaagggggttgttccattggattggaatctcaaacagtgagtatgattttggcaggtgtggcttgagctaaactgtgaaattagcaatctgcaaaacacaaataatagcgtgtgctttggtttacaggaggtatacactctgtgtaaggaagaaaggagataaatctgagtaggcaaaaggatttgaacattatttagcactcagggaagagtcaatatgatgataagaactgtagtttaagattaaatttaggtgtcagaacaaatacaatagagaaggaaagagaagtcagaacacccctggcatgaagtaaaatacatctgttctaagaagtggaatggaggttaccgtccactaggacaatggttcttaacttgttttccttttgaatcttttggaagttacaaaccctcactctgaataatagtgcatggaatatacacaaaaatttgcctgtaattttatccacccttgaactccatccatgaactcaaatttcagaatcacttctttatttactccaagatgatgtcgcatgccagtcaaacatttcttacacaaatggtgacagccctcaactcttgcgaatcaagataagctctagagtttctcatggcattctacagctctgccaactctgataatcatagtggacttaaggaataatagttttacaaaggaaaaaatatatctttttattctcttgactttctttctgcaggttgcactgaaaatagacagattccacatgtatttttcctctctctgctgccgttcactcctgtagcccctaatgactgtgaccttaatgaccttccagaatatccatatggccctttttctcctcaacctagcaacaaacagcatacctgctacataagtgtttggatctcataatatcgttcctaagcctggcctctctcgctgcctggcattgtgtgcctgccacgagaccgggctggctcgtaaaacatctctttatgtactttattacttaaactcttttatttgcctgcaggagccctttaacaaaatcacattgaattgactttctcacaccaaatcaaatctccctggtcccagttcagttgtctttgtcaatatgtattttataaatggagtgaattaacagatgctgttggaacagaagtgctggggtggcgtttatgtttttagtgctctctctgggcagatgcgttgtgtagaagtgttatacaggtatctcgggatgaaagtcatgcgtgtcatttcagtggatatgtattcttagccattttctttgaatagattttaaacctatttattactcatttttttcttagtgtttgcttatatagctttatcatttatgccattaatcttggattggacttgattatatcccttagtatgaaaaggtgaaaaattaaaacctccgtttcattcaaagaggacagatttttctattagccatgggaaactgatcatgagatgactttggaatatattgacttatttatattataaactttgtccatgcggcctttgatgtgaaactctgagttgaaattgtttcagaatacaagactgagttttcatgtcctggactctgacttcagtagaacaaatgactatcgctgtttgtttcataagatgggaatttgggaattttgcagagggaagtataattacagaagtccatggtgtaagggtggcattgaaaaaacatttccctggaagatttccataaaacagaatgattttttttttgaaaagtgtaatatatcagtgctataaaatgtatcacaatgatttggggagcatttttactctaccctctgttttgtggtggtagtcacagagccatctactggtgaagacaagtgtgaatttcttttctttcatgctctgccacaaatgttatacatttgtcctaaggatgactaatcacaaaccttttttttcttctaggcctaaaatatcccttggcttaaaatttggtccccatgaacaatctcagagtttcacaatgatttgtcatattccagactggattttactactatactatttttatctcaaaggcatgatacataattcttggtcttctttaaaaaaaagtggaatcccagttttgcagtcttaactatttagaaattcatccaacagatatgcttataaatgcttttctttttagacatagatatgaaataagcattggtaacatatttgaagtattaataatattgtgagtaaaaattttttcctccactattttctcagttgtgtccaatcaatggaaaccattggatatatatacagtttagaaagacaatatatgctttttcatctgaaaaataaacacctactagtttaatgtgtactgtaccactttactaacatctgcattttgttcaaagacacactccaccttttgtacaaatttaatgaagaggctctggaagaatggaccaatccatcaataatgcatgacctattttgtttttctttgggcatatttaaaatcgtgcattccgtgtgtcaaagttcaaaagtcaagtgctacatgtgataaattaggtaggggtcgaaagttattgcaatgcagtttcggaagattgtctgtctctgaatttgcagctcattcatgctgaagtgatgcactatgggaattactaccaaactctgctccgcaacatctgctctccctaagtgagttagtgcacgtcagacatctttatgtcagaatattgcagtgatggatgcagtcttcagaaaatgctgcataaaaatctggtgtgccgttctggccattaagtgaaattactatttaaattaatggcactgtcacagtttatctgtgcaaagaatgaacgctgattagggtattaagtaattagcaatttatcacactggaacaaggttgataataattaaagaagtaatggtttaccaaagaatctaaaaagggagtcacttcttgttatgtgagtgaaatcttggctgaaaatttcaattcagtaatacaaagatgaagctctttgtgaaagaaggcatcttttttttctagtttaaaaacagttcattatcaaaattttagttgacctgtcagaagtccctcagagtgatcagatgactgattaggagtttcaaattaggtcaatgtctgcatttttattttatacttaaagcatagtgaaaccatgaagtaatttgggaatgagagggggagaatatattccgctccctaaagggccagttttcaaattttgattgctctttaaaagagaaacatgaattgtcttcagaaaactgccagagaaaaaattaacagtaaaaaaatccatggttgtatttaaatgtctaatcagaaggggcagaaaaatgcccgaacaatataaaacttgaagctacggatttttctttttagtttatgtgtgtgtgtacactcatgtatgtatatatttatatgtatttgtgtgtgtatatatacacatacatatgcatacatacatagctacacacacataaatatgtgtatttgggtatgtacttatacatacacacatatatacccaccataatccagactcagactaaaatgagccctgctctttgtattaatttgagataacttttcctagaaatgttaaaaccactaaaattataaatatagcagttaatttgtaaaccaattacttcgaagagttatcacattagataaacatggtatgccaaagctctgttagaatcagtgtatatcattaatcataaataagagtttttaatattagagacttttgtaagtaaaaagatgaatgagagggttctttggagtcatgtgtggataaacatctttcttaaggcatgtgccaaaccaatgtctactttcaatgattttttttaaaagcacttttgatcttttatttgagtgtctttaataatgtagatgtttacacaggaccagattaaacaattcaggaccccagggcactttgaatttgaggttctttatgttatcagtcggaactaataataaacaaacaaaattccaattaaaataaatcattcatcacattgtgctgctatataactggatataaattctaatataaaaacactgtgacatgcagtatagccaccttgatttctagcttgatctgtctctagagtagtgttaatttattcctgctttaatgttaaaatttctgccatttctctttgatggcaatatctaaatgatgcaaatgcaggtaattaaactaaatttggtgggagaaaatgtctatttggtatctcaggtacgtgtgtctttcgtttagatgtggggatcagtgatcctctctacaaggtctttctgcggctgcccccagcctgtcacctgtgtctgtgatgggtctagaacagagtgaggctcaaaaaatagtggctgattagtgcacctgatcagtgaacatgctcagctgattatgaataaataccaaatccatctcatgcagaaaacatggttaccattgcagctaaattcacaagaaacaaatatttgtaccctaaataaagctaagccaaaacttgcactgcttctcccgcagggcttccagttctaggatggtgctacctttccactctgcctgggcttttatcccagagtacttgggtgaccttttctcccttatgaatttctagagctttctcagagtccctatagtttaactaaccttcttctgcaacaagatgttatcatcacaaaatgcgcaggcagttttcatgacagaaatcctatctctttttatggagcatgagagaagtttggcccagctgaatgattttcgaacatttcctcttgtgtgttcttttcctaattagtgtctagtgctcttggtaagaaggaccctcactgcacatttaaatcaccttggtagggaaatgctaccttaggtattgcaccatttcagcaactgcctgagcctgacatttttataccaaactttatagcagcctcagttttcttccctttttctatttcatattcatatataacattttattgttgcaggtatgttctgttgtgggcaggattatgtgaatatgtcagataccatatgctgctcagcttccagtggagagtctaaagcacatattaaaaagaatgacccggtgccagtaaaatgctgtgagactgaacttattccaaagagccagaaatgctgtaatggagttggatataatcctttgaaatatgtttgctctgacaagatttcaactggaatgatgatgaaggtaattgatagaaaagctctcggaggcgctgatttgacaatggaaagagaaatacattgttcataactatttttctaaaataggaatataaaaactcctgtgtgcattattcattttcacattacatccatattaataccgaatgagttcgctatgattgatgttattgcaatgaattctaaaggaattaataatgattagctgttctcagggaagctttacccagcacttcagattagtgcaggactgaaagtctgtgtgccactgaaagagccagcacaggtcgtctggggcctctgcatggtgccatttcatgcctgggagcactgtggatggaggcaggaggaaattcccgcttcttctccctagcccgccagccatcatccaccactttcctttgatagagaccttagatccagcaaattcgcttagttgcatttatatcatattcccttggacaatgcaagatgagcaaatgcctgtgtcaaaagtgaatgaataggcttctgggtgtaatcgcttatgtttttgtatggtgatggtttgtacacagccatgtcatgtatgtgggtattaaacttgacccaggataccagaagcctatcaatttaaggaaaggaccatggacactttaaaaataaacatgctaccgtgttctgtagtaatttgtcattataagaccactaaaaatgggtgtcttggtcacagacaatggaaggacgcttgttcaatgaggcaactacacagtccttgtgtagaccacatacactttgtacactttgggatgtaaaataactcatgagattgttagaagccctgcaagcactttgtatcaatgaatgattaagataacacataaggttggttaaattattctaatgaggacaatatttctccatgctgaatcaagtagtgtgtatacataataatgttcagtctgtaggtttcattttgttttctgaagacctaccacctggagacatttatatcctgttccagtctggaatggatcaccatgggatttttacatagctggcccattcggtcttccctaagctatcaattcaggaattccttttacctctttcctgtgttgattcccctgtttttttgttttgttttgttttgttttgttttgttttggattccaagtttcattccatttggagaattatcttcttgtatatagatgtatggagggtaaattttttaaaagcttaatgtataaaaatactattattttaccctccaacaggattgatagtttggtctgatatacaattccaggttaaaaattatgtctactcagaattttgaggcatttctgcatgttttaagcttccattaatattttgattcctatctctctgttggtaaccatgtttcttttcctatgaaagctcttgaagatgttctctttatcctgctcctctaaaatttcatgacaatgaacctctatgtggaagttaggatggtttctttttgcattttgttttccatttttgtgatgagagcatttaggatctactctcttagcaattttttttttacattacaattcattatgagttaggcagttgtcttccaagtaacatctctagaaccgaagccccttacatcttgtgatgcttcatgcagcccttggatcataatggaaaaggcgcaagaggggacaattgcacacagacagttcctacctggatatagagtacatcctttctatgcactagtcacacagacatatctagtcaggtggcttctcctactgcagccaggtttcaacatcccatgttcccagagagaaaagggaaacatggacatcactgagcacattgcattgtctctgccacattcatctactttccagcttccaaaaaggtatgcactgtcttgtgtgtattatttttctccattttttcttagactttcaacacgtaaaccagtattttactgtcatttagttgggcttttagaggatagatagatagatatagatagatagatacacacacatacacacacacacatatatatatagtgggattctatttatgtagtgtcatcttggctcactgcaacctctacctgctaggttcaagcgattctcctccctcaacctgccaagtagctgggattacaggtgtgcgccaccaagcccagctaatttttgtttttttagtagtgacagggtttcgccatgttgatcggtctggtctcgaaatcctgacctcaagtgatccacccacctccgcctcccaaagtgttgggattatagacatgagccactgcgcccagacccactatatatttttgaatgtactattttgatcaacttggtaagaataattcaacttattttatgtaagagagaggctgaatggagatcaattttaatagcaaaaagtattctaaatacattatgctacttatgtaaaggaaaggcaaagtagatctccacattataaaactattaccttacttatagctcttgtagtgtgggatgattaagtatttaatttccttggattaaaacaaagtggtacttatcaaaaaccataaaaaatctggagatgtgtcagagaaaatgtttataagcgtaaataattataattacaatgacagttcatgaaacatttatatttttaaaaacttggatcagtaatacttctaatgggaccaacttccccaacaacacaggaagtgtaaattctcaaatatcacattctttattttctctaaaattccataggaaagtatcaaatagcaaaaataaaatatttgtagtgtgtatactaagtttaaagacttatcagttttgagtcacacaacaaaccttggtggtaaattatatgatttgagtcacacaacaaaccttggtagtaaattttgtctccatgttccccactgaagaagctgaggttttgaaaacataagtgacttgctcaaggttacagagctgggaagctgcaaaactgaaattttaatcccaatttgtgacatttcaaagtcattgttcttcctagtatacaaactgccttcatttctttttataaattttgaaatattcattcatcaagtaagtggaggaaaaatttcatttgaaagtcacaaaagcctaccctatgtatgtctaaatgaaatttttaaatacccctctctctctcacccctgccacttgactcaggaaaccaaagagtgcaggatcctctgcccagcatctatggaagccacagaacattgtggcaggtgtgacttcaactttaccagccacatttgcactgtgataagagggtctcacaattccacagggaaggcatcaattgaagaaatgtgttcatctgccgaagaaaccattcatacagggagtgtaaacacgtactcttacacaggtaacagaaagcaagctgtctgcccatggcttaatggggttagtgagaagctgctgaaaatgcagatttatttcactctgacatcaactctccttaaactgatatcagtacattccatcatactttgaggccagctagttacaaggtaattaaaggcataatctggatgtattcaaagtcagtactttaaaatgtgttaaagtctatttaaacaaggttgtattccatattaaggtaaatctgtggagatatctgtgacctttactgctatatccagttaatttacaataaatccaatttcctttttcaaaagctgcaatgcagcttccactgaatgcattgaatgaatactgctatactcttaagcagaaagaaggatgaacctgtctgattaataataaaacctaacagtgctactctgaggatgaggtaaacccaagcatgacatttctccaagatggctggtcatctccaaaagaataacctttgcagttattgtaaatattaatttctatgtaccatcttggccctgctgaattagtccaaaatggttatgcttagttttggctgagctgtgtgagaaacactgttaagtttagaattatctctaaaacagttctgccatcaattaaatttgtgttattcatccatttacttaagtccctacaaaatgtgttcttgttttttgaaaaatcaagtttgtgtgtgtgtgtgtgtgtgtgtgtgtgtgtgtgtgtatcatctatcatcttgattcaatagaatccatttaagtgacataatttgagcaagctaaggttaataaacaagcaaaacattgctccattccatcatgaatcatcagtctgctttactcaaccaaggggcaataatggctaacctcaagagtgcagaaagtaaggcaggctactaagataagaggaggaagattaggaagggaagaaaggaacagagataaggttgattgaacattatttagtctcaatgttatactaggtactttaatttttttattatactttaagttctagggtacatgtgcacaacgtgcaggtttgttacatgtatacatgtgccatgttggtgtgctgcacccattaacttgtcatttacattaggtatatctctacactaggtactttaaaaccttatctcagttaccaacaaagcaatcatataaatatggtcatttaacagatgaggaaactgagggtcagatctgtaaaagttactcgccatgagaaagaaacatattcaaataatgccatcatcaaaagggacagactttgaagactccacgtggtgcaggagctcctttcagagtgctccaaatgcacttcaagctgttattccacctgaaatgtcctcctttatcatcctactcaaggcctaggtcaagattcttttcctcaatgcagtccctgtgctgctatggcacattgttcacaaagctcactagctctctcatgtgtcatatggatttggacacttgttccagctcttctattagattgaaacatccttatgaatagggcatttttgtttacctttgcctcgttatttggatttagaacactatacaaacaaaaaatatttcttggaatgaatttaattaggaaaggcctcagatagaggacaatttgtccaaccttctattgtgttcccagtcccagttatagatttaagtcatggactttcatttttaaattattgagtttccatctaagagagttctctacttttatctgccccttgtaatcaagatcaagattttgaagggcttttaataaatacttgtaatagccctctccagaagtgaatagatgtttccacctactgatataatgttatgagggcttttaaaatccatatttcagattgctttgcctgcagaaaatactacaaattgaatatgaaaaataacaaactgttctttttcatgaaagatgttcagcacacaagtggtgctatgataattccattgagaacaatttagattaagtcagactcttttagaaacttacacttgaaagctgacaataccagtgctgacaaaaatttattcatttatgcaatcatttatttatcaaaaattatttattaaatacctactaataactagtcactacattaggactagcagctatgatgacaaacaataatttttcattgagatttcaaccctatatgaagaaagaaggaagcagcaaatgagatttgaaatggtaatgtgggcttgaggatacagaataacagtcattaccaataagtagtttaatttgctgtagcagaaatgtaaaacatattgaccatctgagggtaggtagatggtctaggcaactgaatcgcacaaggtcattcaggtatccagaatccagaatggcaaccgaaggtatgcaattttctctttataaaatgatgtggaagttgtcagtgtctttctatactccttcaagtattgagatctgagtcatgtgaccactagaagctacaaagaaaactggcaaatgtggttttctaagcaggaggcctctgaccaggatggaagggagaactggggactcatggttgccatcacaggcaacaagtggcagatacccccgagcagaaaaaaatggaaaaggaagataatgctttacatttgtagagcaatctgcattttatgaagttctgccccataatttattgcattgtattttcatattagttctatacagtgggcagggaagggtttattgtaaggagatgtatataaggagaatgtctctccattaatctaagcatagagactgagaattaactccacgtccaatggagatgagcaggtggccaggcagccaaggaggaaggcctccttttctgatgctcaatctgagaaagagtcatccagaagctaacacacaaaaatacatacatacttacttaaaattcatcaaattagagacatggaaaataaatttaaataattaaactttcaagtaagtttttcaggggaaatgtgtagcattggtatttccgaagttattaaagcctaaatggaactaagactttggggacacaactgaatcacatgagtgttcatctaatacaatttttgccagtttggaaagctcagcaggcttggttttattgttttaataaagttggttggtttgtattttggttttcagttctggcttttgtggaagagggaaggaactagatagcagagtatgctttcatttttattcactaacatggtaccatgataaactaagtttcaaatcctgtatattgtaacaacattataatccatatgatttaaaattttttaagtaatattaacaaagtaacagaaagcaataatttataagttctatgatactaaaactataaaagaatgttgccaaacctgtctcatgtaggaatcaaaactacatgaatttgtgaagcactaaatcttattatacatgattccagtgcttttatttttcatttatttaatatatccctctttctctgctcagaaacagggaattctattctgtgcaattccgtatccctgcatctaataaatactttaaatgttacttatatttagaaaataaagatattagagttttatttatatacaaagcgtttagagcattaaacatttatttttaaatgtctaaagtttttgatattcacttttaatatgatggttaaaaaatgaaaataagagaaacttccctgtctattttttctctttccagatgtgaacctcaagccctacatgacatatgagtacaggatttctgcctggaacagctatgggcgaggactcagcaaagctgtgagagccagaacaaaagaagatgtgcctcaaggagtgagtccccctacgtggaccaaaatagacaatcttgaagatacaattgtcttaaactggagaaaacctatacaatcaaatggtattgagatacctttaaaatacaaataacaaaatcccataaattcataagaaaattgaaatgagtacaatctacatttaattgccctatgcatctaaccactagaaaagtatgttccgataaagggaactgtaattatgtgacaactaatcactcactttgtggtgtagtcctcgtagatttttagcctaaataagtaaaaaaatagaaatgaaagttccttgaatcccagaatatatctgagctgctttcaaaacaagcaaggcatattcagagaaggggaaagagttttaatattgaaagtaaatttgtttcatagtgaaaggaaataaacataaatgactcttatcatttatgtcaagaatccatctcctccataatagtataattaggaactgcttgagacagcaatataataggaaattaaaattaaataaagctatagtattgcatttcttccgaacactaagatttgtaagttgtttgcaaatagttaaaatgatatcacattcaaatgcagtcatttttctgcttcttttaggtcctattatttactacatccttcttcgaaatggaattgaacgttttcggggaacatcactgagcttctctgataaagagggaattcaaccatttcaggaatattcatatcagctgaaagcttgcacggttgctggctgtgccaccagtagcaaggtaagaggagtttgcctaaactctgggaaaaggggttcagtgtgaagattatctgaacatccaggttgtgactgcttttttcattgaagaaaacaatgtccctcctcaaagtggtgttaagtagcgtgttcatgtgtcacgttaactgagtgctaatacctatggctggaaggagagatcatttcaagggagatttatccaaatatcaatcttgtgttaatgaaaaacaagtgaaatcttgaagcagtaccatcttttcttccacattctttcctcaccaaccaattttaggtaatctataaatctataaaaatgtccaaatcattattcagttaaagaaagtttctatttaaatatgatatgaacaaaaattgtctgattttaaaaaatgaagagaagggcaaaaaagcctggcacggaaaacaaaattgttccaagccttctgctatagccttgtcaagaaataatgaagacctgaatttaggcagcagaggtcagaaccgagaatacagaatgatacaacagacatgggggataaaatctacaaaacttggtactcaattatatttacagaaataaaaggaaagagtcacggatattgtcaaatatctgcttgagtaatttgtggatcatggtgctattctgcaagcaaatttttaaaaaagagaaaaatgttgaaggtaaaagaataggattctgttttgttaagttttgtaaaaaatatatttaaagagaaggatcagatagcagggtggcggaagcagatagtacttggcactttatgtgaaaatatctggtcagaaaccagattgagaggtgactgaagtttctagaaagatctgtatgggaagttgaagtaatgagtataaatatggacatggaaggagaatagagagaaacaaatatggaatattgtggatgatgagcactggggaatgctaccaaatgaaaaagaaagaaaagcccacaaagaagactggaaataaacaatcaaacaatgtgggagtaaaataaagaaagggacatttcatagaagccagccttgacagaggaagcccaggaggaaacaaacttacacagagtagctctgattcttttcatatgcttaaaactttagaagagcaacatctttgcacactgtgcaagagccatccaaatgaaacattcagccacactgctcagccacagtgcaagaatgcaacattttgttcaacagacttctggaaacctttctgagtgagccaccatttagatagatagatggcagctgattggcccagtcaaaagttattagtcctagaacaattccatgctttttgcataggcacacttcatgcctgctacatgcaaagcaattgtttacaaagtgaaaaaagttaattctatgaaagaagccaatttttgtccaaaactatgttttgacaatattgactaagtaattgatttatttttttcttctgacttgtttctttctttagaaagttggtgcagacactataaagtcatcctaggtatcatgggaagagtaccgaaatgtctgcccatttattctgttcaaagcatattgtatgcaagcaagttcagatgtggcttttgctccatatttactggtgcttaaaatgtatgaaatcaggctgttaaaatgcaaagacactgatgggccatatggaagagagttatcaagagttctctagtaagacagtctgccagccagattttacttgtttaaacactgagggctgcactctgccgtcaaaattgttgttgaacctgttgtgataaatggtagtgtgagacttatgtaatatattcaaggtcagatttcattgtttaaataggttgggagggaaaaaaatgaaaaaaaagggaaatgcttctccaagcccctgctaatgatatgccaggccagacaacattttaaaacaaaagtgacattctcattgatcaggatagctagtgcactattacaataaattgctgcttaattcctacgtcttcaggtagttgcagctactacccaaggagttccggagagcatcctgccaccaagcatcacagccctaagtgcagtggctctgcatctgagctggagtgtccctgagaaatcaaacggcgtcattaaagagtaccagatcaggcaggttgggaaaggtctcatccacactgacaccactgacaggagacagcatacggtcacaggtgagaaaacaaaaaaaaaggaaatcctactggaggagtctgtcattgtggttaggggggcaaagcatcccaggggtgtgtgtttgatatatgaggtcacttcgaaaggacgtgttctcttgacatatggtcaggtcccacttatccatgctaatagaagagcccacactggcagcaatacgccacaacagcagataacttcagaaataatttatatttggccttgatatgcattatgtgaagggtttttgcatcagtattaactttttttttcaaacaaacagtaagatgcattttcattccccaaggatatactcatagttaatgggactaagatagccaagaatatactggaaggcaggggaaaatcagccagaggttaacatttgtctatcaagtggataattaatacacaggactagttgacagtggagtcattgtgactgtttgttactattaggaatgttaattaatagcaattgtgtttttttaatttattataatgtttattatcattagccttaataatatactattagtacagtacaatgatatgttagataattgctagtagtgattatgataataattaacaggttttagcttaaatgccacttctgaagggaggagaagcattttctgacttacttgctcgaataggttctctaacacaccaccacatcactttgttttatttccatcatagacctctcactgcctgatattttagtgtttgttttttgtctttttatgtctctccacacttgaatgtaggctccaagagagcaggaaccttatctacttgttcagtgttgtacctctagcacttatagtcctgaacacattaataggagctaaataaacgtttggggaagaagggaacttaatatgtgccagacgctgtcctaagcactttgagtgcactatgcaatttgattctccatcaccaacctaagatgtacagtgaattactaccttcattttacagaaaagaatactttgagaagttaagtaatttagttcattattcgagtctactgaatcatcccaaacaaccctgttaagtttaaattctaagaccatgggcaagattgtataaactttcccttttttcccattgtcagccacctccttccaagacttcctgagtggatgacctccttccattggactgcactttttgcagggggtgttgatagcacagataatgaaactcacagaaaagtgcagaaaggccttggaaaaatgtgactgatttttcctaagaagggacacaggttacacttacacagggtggcaaaataaattcatcacttttcactcttaaatgccacaattccctaacacataagcaagcattcattgacaaaatctccagtatttttccaaaagggccgtaaacctgcagaaggtgcttaatacaactcttggcctggcacattgtattccttacctcaagatcctgggctaaatcaatgatgatagtgttgaggctgggtgcggtggctcatgcctgtaatctcagcactttgggacgccgaggcagccggatcacctgaggtcaggagttcgagaccagcctggccaacatggcaaaacctcgtctctactaaaaatacaaaaatcagttgggcatggtggtgtgcatctgtaatcccagctactctggaggctgaggtaggggaatcactccaacctgggcggcagaggttgcagtgagctgagattacaccagtgcactccagcctgggcaacagaacgagactctgtctcaaaaaaaaaaaaaagataatggggttgggagaagccctcatatttgaatgatcaaaattatttcttttatcttattttacttgaagtggaaatcatcacaagtgattgaaataatggtgttttacataataaaaccttacttctatgtggtgctttatcatttaaagaaacgtttgcattttgacttctctgactctcatcacatccttgtaagagatgtttttaataatcatatctgaaagatgaagaagaaagccaacctactcagcgtatccaaggcattcactgcctgtatctgaaaggaaatcagaatatcatttcgttctcccaaaaatgaattgccagcttgcagttttccagatagtacactaagtggtctaaaataagactgctgctcttaagatcctctcacgtacagggaagactgacaagaaaagaaataactgaaaacagagctctatacaggatgcagtggtgaaaaatcaaatgagtcacttggagtaagcaatgggatgttaattacagggttttgaaaagcaagtttaggcacattaagactgtaccagcaaaggtttcacaataattgtgatataaggctaaagaaatttcttcttgtagtatctatcaacttaaccagcatcagcttcgaattgttgctactttattggtttgcattttttagaaatcagcatttatacaccaacagaccaaattcaattgtaatgttcaaaccaacaggattgatagcctcattaattataaaataattgcaaagatttttctctaaataacttcaccctaccagttcttcctttcattgacatttttaatggctatttttatgtcagagtagatttcatacatgtatcttggtgccagaaatcctattattagcataaatattttaaggttttttaatataattttaatttttacttaacagtaaaaaatcataatctggtaaaagcctttaggagtcctttgaccaatctccctgttctacttttgatttgttttaatttctatggatattgttttaaatagatttagagagtatttcacttgcccaatacagccctaaagaggggtttctttgtagaataaagaaataagtcctcattcagcaaaaccttaccaagtacagagcctcctatatgtagttctttggggacaggaatggtgctaggcattagataatcggaaacttgagatctatataatgttactcatttgcccaggaaaattcagttccacggttagctgactgaccaaatgtagtactgaagtattttatggtgtgaatgactgttttattgagttcatggaatgaactaaaataatcaaatttattttctgttccatcttaaatgtttgatggaaatgctgcctgaaccccctaggataaatgttttgattttctcatcatttccaaaagcttggcattccctaagcaacacagcactaataaagctgtagcactagtcgtcctggagcctgaaaatctaggtccttaggaatgacaggagggaaagggagcaccttgcctcggccccattgtctccatgcttatttttaattacctcaaagctttagaaacatgatcccgtaaatgctttgtgggaatagtggcgaatgcactcatcatgtgaaatccataaattgcttataatcctctcaagatgttaaaaaaagcattaagtaattgaagacaggaagtcctcggttaattatttagaggtgttatcaatgctttaagtaaactgaagcgttttctgctatctcactgagctgaataccatggggacgaaggagtagcagccatcatcttctcatattcgctaatgcaaacagcgcatggcagcttgtcaataaaagaccttttcatatcatttattactaaacacatccaccatcctgtacagaacaatttggacatcagttatggcattgtttcactttgggctacctctacattatacgtaggcctcctaatgtgagtttaggaatagaagaaaggattaactaaataattaaggccactgagaaaaaaatgaattagtcatgtcctgtttagcataacgtataataagggcctatgtgtctcttactctggaaaactattttcaaaataattaattagaaattactcatcattgcatttcatttaaaaggaaaaactcaccagcattaaattagcaaggaaagaataatttactttcgtttctcatcttcctagaagttaatgaaaactttgtgtgctaaatagaacaaaccctaacaatgctggttgtagcagaaaatgtaatactaatgttatactgaaacagataccttacacttcaccttggaaaaagagaaaacatactttaaccaccaatacaacaaaatgtagaaattctttgtaagggattttatttttagataactctgctatgtgttcccatattatctttgctctcgtagtaattatcacattttattctaatagcctttcctcttgtctctgttccacacttagtaataggtaatgctttttaagtacagagacagtagcttcctgtttgccattgtgttcctggtacctatcacagtacttaatatattcaaaaaatgtttgtcgaatgaataaatactgaatagtaaactagtatttgactacattctgttttgaatggagataaaaatgccactgtcaaacgtatctaaatcgcagacagatctggcaacaaaattgtggggtccagtgcgaaatgaaaattcaggccccttgttcagaaatcattaaaatttcaagacaatggaagcagagcatagaagtaagctcatgtgcttccaagcatggtaccgtgtttgattgcacagtcgaagcccacaaagccaaccctgatctccagcagtctggaattagctgcagtatatttctttaattaaaacagatagcaagaaaactaggatggtgataatgtcctcaaaaagctttgggagtttcttctatggttgtttgcaatgctccaggctgcattccccccagttactatgtaattactgaccaccaagcactggggacctgtgaaaatagagataagaatttgttttcttttcattttttcaactctgagaacaactaaatttgtgcctgaccaaaaaagtaaaaaaaaaaaagaaaaaaaaaagtgtggcatcaaccacttttttgtgttttaaaacctgcctattgataaaatattaaggccaaagaactataattgatagctgcctagacaatgatattttttaaaattccccttaaatcccagatattccaatgtactttgccagatactagttctgttttgtcactccagttctggccacccccttccctctgcaatgtcctcattgtctcacgtttgagcaacatcagattttgctgccacctgacatcacattttgtttttagagaagaaaagtctgcctggaaatgcagagaagaatcctcagtctagcataacactgaacttgaaagaggaaaagtatttattaaaatatttattaaaatactgtcactaaaatcaaaatatatatatcacagatataattcatattatatttttgttgttatatttattccagatatacatcaacattaagactattatttagacaccaccaaagaaaaagggtctttccttggtggtgtctaaataatagtcttaatgctgatgtatatctaaagagagtctgccaaagaagtaacttgtttaggaaaggcgtcttgggatcaggaagatattggagagaggggcctaagctatggcccagaatttcaaatgaaatatagaattaataacgcaagttagcttatagcaagtagtcagaactaaaagtcatgaagtgatcttactggcatgtgcaatgcaagagtccctttgttttgatgttttgatgttcagttcatatgaggtagcaactgaattcataaagcatgaatacagaaaatggacagtacaaatgctgctcaatgggggggaggaaattggcttgggtaagtggaatgggcagctgttgagattgtgaagaatgataccatccagaaaagatggctttagcatgtgaactcccgaaataatccttaatcaaatcctgtaaaacaaattctaatttaaaggtaccttagatgtctgtaaagtaattccatgatgcctttgtataccagttttgaacatctggattttcacagattgtcagattgatctaagtagaatgctgatatggctctatccatcacagtcaagatcaccaggggatgctggaagttcctgggaatctcagtaggcagagatgctccgaaagggatcacttagtgagatcccaggcaagtgagggcaaaaggaagcaacatcattatagttgtctgggtatatactctggggctcgttgtcttgcgccaagaaagaattcaggacacagacacatgtgggtgtgttaaggagtggaaagtttaatagaagaaaggagagaggagagcagctccttgtgagagagagagagaaagacagagagagagagagagagagacagagagagagagagagagacagagagacagagagacatccgtaaagtggggaggcagcggaccaaagcagattttacaggcaggctggagaaggcagtgtctgatttatatagggctcacagattggttcgatcaagtatgacatttacatagtgggaggggaaggctggtcaccccaccctaatcttattatgcaaatgggccttccagttgattggttccatcttgtctgagccttacagtacaagtggctgacaaggagaagggaagatggagcctccatcttgaacatgtacagtccttagttcctgcccacattcacccatgcaagcacccagcttgtttacctatgtctgcagctcgattttacatgcttgccctttgttagaaaattatttggggctttttactaaaaagaaaaggcttaccgaggactcccatacctttactatctgcctaagtgatttcttcttaactcctgtatcattagcaaggactgaatgtgagcagccgaggggccagaccacacatccagtttgggtgaactggtgccaggacagatgacttacccgcaggatggttattcacaatactttataagcaccaaacaaaaactttttaacgtaactcaggcctctcagtgcttgagctaatcactaaacatgctgatggaggaactcactgaattacacatcctttaggactatttggtaattctttagaacatagcagatgacactatagaataattggctgaatgttttgaagtagcacttgctatgtgaaattataatggctaaagtgcctttttttgactatttatcaagagattaaaaattggaagcaagctgttctttatagagtacatcaaatgttaactttcatagacatgggttttgttttccaaatcatatttttatgaactaaaggcagactttttgcagtcccttttagcacacatttactcttcaaagtaatgttacttggaagtgtaattgtaatgagtttggttatattatgcttctttcctttaaaaaagaacatgattccctgtagggaaattcaggtaatttgcagccacagtaatcttcactatactgaaatgttaaatacttggcttttctccatgtgtttgcctttctgtactctacaagtgctatttcctactcttctaattcaatgctgagcacttgaatgatgttttcttttctccttctactcttcgacttcaggattaagttacagttggaatggttcctttgagacatctctttatttccctcttctcatcctgatcaattcatgagtagttttcaattggtgtgccctttttattgcctgttgctagtatgtcatatatatctcattttaaggactaccgatagaggcttacttaaaatgacagcaaattccagttgaaatgtgttcattttattgagttttacagagtcgtatatatgaaaggtcatcaggttcatgtaaatcatctatgcctgatggtagttgatgctttcttacagattatctgaaccaagcctattagtaatccagtcctctaacaatatgaaaaatataaaaactaaaagatagaatatggttttaaattttctaaattatggatttagatattgccttcccttaaattaatctgtaggcctattaagcagtctctactatcatgcctacagtttatagatatagaaactgaggaacctagaagccagaaaacttccttgtagtctagtacttggtaagtagataagtattagaacccaaatagtctaatttcagactgctctcttagcacagaacatgactcagtatctcactacatgactcataataatattcaaaatgaaaatatttaaatatatagtcccacttgaatttttttttttttttttttttttttttttttttttttttttttttgagacggagtctcgctctgtcgcccaggctggagtgcagtggcgggatctcggctcactgcaagctccgcctcctgggttcacgccattctcctgcctcagcctcccaagtagctgggactgcaggcgcccgccactacgcccggctaattttttgtatttttagtagagacggggtttcaccgttttagccgggatggtctcgatctcctgacctcgtgatccgcccgcctcggcctcccaaagtgctgggattacaggcgtgagccactgcgcccggccgaattttttatattactggaaatttgactgggctttgagctatttatgtcatcgtttttgttataaggctgggaagcctaacccagttgctctgggccacatttctcagtgtaattgcccaagttccaaccttggcctcaccctttccttttctttctttctttttttttttaggcagtctagctactatgtcacccaggctggagcatagtggcaggatctcagctcactgcaacctctgcctcccaggttcaagcaattctccagcatcagcctcccaaacagctgggactacaggcatgcaccaccacgcctggctaatttttgtaggtttttttttttttttttttttttttagtagagacggggtttcactatgttggccaggttggtctcaaactcctgacctcaagtgatccacccgcctcgtcctcccaaagtgctgggactagaggcatgagccaccgtaccaccggtcccggccctttcttatgtctgtgatcataggtactttcctccaactttctgtgccttagcttccttatctgtataatgaacaaataatagcgtgcacagcagaaagttagtgtgggcgttaattatattaacacccatgaagtgcacagaagagggccaactagtagtacatgctcaataaacttttgctagtatgtcatttacataatcttataactaacttccttgaaaataactgcaattctcataaaatatatttagataatgtatagagtccaatgaaaagagaattaaaaacagaccaacaaaaacaaaaacaccctgagttttgtctgttgggtattttttttcttaatttatagtttttgtgctggtgtttgaactacattcttttaacttttttttttcgttttgagcaactacagtgtatacaattatgacttgccaattaaaataatattaattttaataaagagcagctgcaatggtttctaccatttttatgtcttctaaatgctgcttaatcttcagagggaaggcagccattgagtaacttaaatactgttagctctagctcttatgtgatggagaacatagagcttggtattcaggcttgggtcatctatgcactcctcagtccaggtgaagtcaacgctaaataaagtacaaagcctgatagtggacaaatgactggcttatccaaggaaaatgtgagttttgttataaaaagcaggaacagaccctggaaggtaaatatggcagatgtgaagttgcttgacacacattagcaaacatcatttgaaatgagcctaagtattactaccctttgcccacatggtccattaaactggtcagcatggctacatttcagggacagacacagctcttgaggataaagtgccaatgaattagagtaaaactgtcattctccccatattcacttgcagacatgtctcccactctcatcctcctggttcttcaatctttgtctcctttcctcagtgcaccatgttgactcctcttgatttgataatatgtttgaactcctctgacttcttgacgaaggttttctgctcagtgctgagtctgccattcctccttgattctagtaccccagtagcttcaagagaagcaaattccttccaccagccctacccccatatcctgctaggtgaacctatcccatctaatgtaaacacctgtagcaaactcctttgatgcactttcctccctctatcaaaaatccttaaggtgctggatgctctactgctgtaccatgcctaaacacctgccttctcaaattctaggctgtaagtaaaatggagaccactcaacttgcagcagaaaggctttgtcaagaaatgacaatttatatttttatatacattaattttcctttcagctacgattctcattacaaatacgcttaatcctctaatcaaccttagcaaacctctgtgattatgaattttcttttttccctaatgcccatcctaaaattttatttaacagtcactgcatgtctgaaatcagaccagccacgaccacaatgaggaagataactgaggccattgttttgctcagaatattcgagaaaaaaatttaaatatctgtttacttttagctaccatatttacatctggcattcaggaaaaaatctagaatatgtgtattgcccacaaattatattagtttctgttattttattaatattctgcaactaaaaaatatctccaactcaatgaaatcattgctgtggacagggataccgatggaattatgaggaaggacctttttggtcaggtcacatggtgataaacatcgtagcctcatatccctgcaatccttatgggacactatgatgggcatgctcttctttaagcaatatttgttcaacattgaatgcctaaaaatgggcactataggggaaagtgacctcccaaaaagactcgctcagtgatgccatttctactctcaaagggcttatattctaaatggggaaaataagatattcaggtaaaatggtatcacactggtcaagacccctttttgtcggtaaagagaatgaaggggagacattgtcgagctaaacgagtttgccactgcaacctctgagtttcattcttgaatgttcccttccattattttgagctttacattttgtaatcatagcattttccgatgagcttttatcaaacatatgtggcttgggtacggcttagatctttagtcatattcttcatctgtaaatcaggtaaatatcaaaattatgtaaatcctccaaagcaaccaaatggaagattgtaatcaaataagtgcctgcatcttatcactaagttgataaaaaaaatacaaagggctctgaagctaaaccttggagcagctccagctgcagaacattattgctttagcagagaacccagactactgctctcattctaaatggatgagatgggtaattttttcattcgtttaacgaacacacactttgtgcctgtcacaatcctaaggatacagataggcaaaacaaagttgttgttctttcagagcatacatctaaagcaggagacaaatatcaaataagcaagagacacagcaaacatcagagacggttgaaggctctgaaataagaaaattatgtgaggggataaaaagggatgggtggattgtttagataaagtggtcaaaattttttaaaatgtagtatttgaggagaaatctgcataaatagacaaagtgacacattaacatctctgaaggaacagtcattccaccaaaagaacaaaatatgcgaaaatgtagctcaaaatacgtgaaaaaataagcataacaatcattggattcatctgtaacttagttcaattatttaacaaataggctcagtcctgttgttttaaaatactatttttttctcaaagagagctttggcattgtttgaactttcccaagagtcaagagagagatgtcttgtaagcctcaatatcctccttgttgaatgctgctgagctttaaagttgcttctgctagaatgaaatactactttgagtatcctatttcatcttctcttgtctgctagatgctataatgattccccattttacagatcagtagaccaaggcaaagagaagctaagtaactctaacaaggtcaccagccacgcacagagcagcgaaatctaacaatatacaacttctattttagatggattgtcattcttttctccctgaaaacttactgaacaattaccatactgcatcatattctgaatacgaaagaagtaataagcaccatctcttctccaaattagctttaatctatgtgtaaagacaaaatcaacacacctcaaaaaagggcgcattagatacagtgcaaggtttaaaaacaaaagtgttggttagcgttaatatgagttgaatatggcttggggcaagaaaatgttggatctaaccttctttttattttcctgcccgtatttatataagaagcaattgcagagactgggatggttagcctggagaagagaagactcaggggggatttgataactgtctacaaacatttgaagagctgtcatgtggaaaagaaattagatttgttctatatgtccccaggggtgaaagtgatagaaagatttcatcacaatataaggaaggactttcaaacaaaataaggataactctaaggctctctaaagatgtaatgggctctttgagagacggagtgctctgatccgataggcaggacagccttttcaatgacatcttgtatagggaatcaagagaagggtggatggttcacatgaattttaaggtcttttctatggctgagaatttattagtttatcagtgataaatgaaattttgcccaatacttagcctcttatgaggttcagaccttctttaaagagtgttttagagagtactcttaaatgttttggctatcatatctacaactctgcatgttacttctggtacttaattgataataaataatcctcttaaggtgcactttatttcttgcttgctttttctaggtctccagccatacaccaactacagcttcactcttacagcttgtacatctgctgggtgcacttcaagcgagccttttctaggtcagacactgcaggcagctcctgaaggtaatgaaacaatatccatggtttgagggaagaaattttcacatagcattttgaggtggaatctgtaaactccttcataacaaataaggaagaggcaataaagttgataggtacaaaataaaatagcattctaggttcccattcttcaggcttgattcatgtaggtgtagcttcccaaggtcagttcgctttcaattctttaacctttatagagttgattttctgtggaaagaagaattattgaaatttttcaaaaactcagatgttaaatattttgggagcatctaatatataataagcaccatgctcactgctgaagttgtttaaaatgttctctgccctcaagactgacaatcaagtagaagtgataggagaaagatctgtatgaagagagaaaatctgaaagttgatgttaagaaagaacaaatgaatagagtgctaaggttggcctgaagaggaagagatagaaacccatcgatgacatcaaaaaaggctttatggagcagatgacttctgagatggaccacaacaaacaaggattttgacaaatgaacagtgatgtacagagatgtacaaccagacacagttggaaggaatgtaagatggaatcatcaccttagaaggcaaattgcaaatgtctatcacatttaaattgttaatttcccatgatacagctgttctattttcatcatttatgccagaaactgtgccacactgctcaaggaggcatgcaccaggatgtttattgaagcatttattttgtttaatagcaaaatgttgggagcaattttaatgtttgtgagtagaattgctaaataaattcagctattctcatattgtggaattccatgcaccagtataaaagaatgagatgatcagttcatacaaagaggaagttatgacattatattaatttataagaacaaactgagaaaatggcatttattgttaatggttaataaataaatgcatttaaaaatccaggaagtatacacaccaactgatagcaatggttacccatgtgttcagaggtgggatggctggtgtcatttactttcaaaagaaaaatatactcagtggcatgtgttagtgatcaactaattattttgttaatcttcattatctgcctatttttcatatggggaaaccaaggcataaataagtttctaaacagaaatgcaatgttaattaccaccatagactcctgaactacttgtccattactcttctaatgaaatggattgttgtacctcggaatattagacctgaacttcctaccagtaaatggggaataaaatggaaaattccacatatggggcatatggctcctcaccaggaattcactaatgatgttttctatataaagaatgtttcatgtcaaaaagcttagtgttcctttgaaaggaagaaaccagcagtggattttttggaaaggtaaactatcaaatggatactttgatgataatggataatttctaaaggatctatcaaccagatttggctgaaactcaacctgataaaataacagaatctcttgttccatttctctctaccaaattcatatatttaaattcattggaaatatgaaattttcccaacaaaatttcttgaaatgacttacattttatgacttaaaaattgtagctttcaacagtgcagggtaatgtgatatgagaaatgcccttgatttcttttttttttttaactttatgtatctttcctctaacacaaataatcatgcaaagaaataatagatgaaatggactttcctctgcagaagaaacatggatttagggccattttctggctgaataagtgccatttatatataacccatatatgaaataaatatagtgtgaatgcttaacttgggaacaccttagcaatcacattaagttctgttgttttactgtaaagtgaaaacaagtataccactttagattatccacccagacataactaattataaaatgccattttcgaagtacatcagatataatttgaagatctcatatttgagtattttaagtggacatggaaagaattaaaagaagtgtttatgcatagccaacgcaagctgagctcttttcacttgcctctcattttcaatctaagaaaaagtcaatgtacattacaacctcattgacaagttggacacagttctctacagttttatcctcatagaaaactgtgtacctgtacctttagtcaaataacaggaagattttgaattgaattattactctttttttctacaattactgccatccatgtgagttctaattcattttagagataaatcatgcaaaattgcagacatactttcctctagcattgataatgtggaaacagaaaggaaaagaagacccagtctttttcagttcattccagattcctcttcctctgcccttcttttaacgtttacacacccttggttttttcctctactctttacactatagcacccaggctcttctggaattttcgagtactggctttatctcctaatgaaggctgagagctaccaaatactaaagctctcaccaaagctacacttatggatttaaatcctatgtatttactggtctactacatgtttatatttaggtgtttttcaaaaactttaacctcagtacttcgccacttaattcttccactccactctactcctcaacttgcttttcttctctcaaatactaccacctacctatcacctaagcccaaagcttgacactcttgatggctcccttttccatatgtaatacataattttttataaaatctaattagttttaaatcttaagaattttttttaaaaaaattgttcttctttcccgtcccttttaacactgccttagttcagatcctcatagctataagaagagaagttctctggatcctcctaactaggatcccttcctctagtcatttttcctctttctcacatcccacatcctgattctttttcctcttttgacaaaataagaatatgtcatattattcacctccataaagtcccatttccttccaggaagacatacatccatatctccttagcaaagcaacatggacccctcaagttttaacttccatcaatttttcaaggctttccatcttccccacatgccatgcagtgcaccagccatgccaaggtatgtgcagtcctgccatccttgcccacatttctacgactttatgtgggttcccctcagcctgaactccctttccctacatcctcactcagttaacgctcaccttttcaaaacttggttcacgcatctccccttctggaaatcttccactacaaccacctacttcctacccatctccacttctccccacagtctgtgtcaggttaccctttctaagtgttctaacagctactgtgcctccttctcttaaagcatgtatcatactggagtacaactttttatcgactcatctttattcaccatgatacatgaactccatgaaggataagaaaaagtctttatcttcccatccacagtgcccaacacagaaaatgacacaaagtcgggtagaatgttgagtgaataaattaacaaatactaaattgtccagaattcagtgcatccctgacatcagctaatacaaaatttgttcctatcaccagatttcaggagaaaaacaatccacaataaatgctgggaattttgaattggaatgaagatttgtagggacatgagaagtgggtaatatggcatgcaactcaagataaatttaaaacaaatacagtagacatgttctacttgttgtcactgtgtaaaaaggcccaccaaggtttaattctacctttccccttttaaccttgcagctagtttaccccaccccatcctcctaggttacttccctccctactattcatttctttcacttgaactgcctcagtttgctcccttattatatagaataggtttttctggtttcacctgagacttaggccagagttacatggtgaaggggacaaattccccacctcggactcattaatatatctcaccaaagattgtcttactctagcaaagatttcttgcagctgccaagataacgatgtccccatatcaccatccaagtaaaaatgcagcactttctagttatatatacatttgaactccatattatcaatcaaaccaatgggcatggagttattaccaacttgaaaagagcttttgccagccggtataaataataaactcaacttttacctaaaggttgaaacaaacccaaaattatgtttcattttattttattagctcctccacatccacaggctttattgactggttcaaatcagaaaccaagcaatagccattctagtaccttggtgatttttaatacatcgttcaaggtgaaaaagatataactgcaggaagcagattatgaattaagattttatactttatcttttgaatcaacaaattaatatcacatttaaatcaaaactctgattggttgaatcatctagcagctgttggcagagaaacccacatacaaatgtgtactatgatttgtgaattttaccaaatatctagaacagagcagactctcagaacaaaatgaactactttcttctcaggaatatattgctccttagaaagttgggatgtttgagacatttttgaaatctatcttgtttctttcaggatgctgctaaataaattgcattttgttcttctgaaaatttttcttctaaaagtgtcaaaatcttaacctgtacggagtaacttacacaggagatacaatcaagcaaaagctattgattacagggaacctaatattgaaatgagttttttttaatctccagaagagatttacagtgtctaatcagagtataactagatgacaacataaagtggtaggactgaactttctcactgctggcttctccatcgatggatttgtacatctataagagtacttgaatgtttgacattgaattacagttgtttgtgtgtatattttattttttagacagaagtataaactccttgaaagtgagccacatcttagtcatctttgcattccctagaactgcctgcagtgcttagcataacattttgcaggagatatatttacaataaatctactcattaaacatgtattaggcattgtgttatccatagagatacattgacgaataagacagagaagatccctgctaccatggaactaactttgcatcaaagtaagagaaaggagaggactgcaccatcatataatgtaaaaataatagtatgtcaaagaaagaatttgattatgatgtcttgagtgttaagaaggaaatagaaaaggccatgcgatacagagaaactaggttgggactccattagatggggttcaagttagagttaagagagtgctaaaatgaggccttatcaataaggtgatagttacacaagtaactgaactatgagaacatatgagaacattctacatataagaacaattctacatatgagaacaaaatgcaaaaatgtcatgctgtaagggaacaaaggtgttccaggccaaaggaaccgaagttcaaaagcccaggtgtaggaaataactagaagcattctagggatagaaaggaatctggtatggccacagctctgtgaatggtgcaaagaatgctgccacttaggccagagccaataaaatgtgggaccatatgggtcacaaaaagaaattgggattatattatatgaataaattcaaaagggttatatggttcataaagatgacactggcttacatattcactttatacacttttacaaagattccaatggaatatggaaggccaagatttcgacatggaggcaagtttagaagctatgacaggagtttatgagagagagaaacgtggcttggaccaggagaagtgaaagtaaagatacaggaaagtatacattatagaatcttctgggctttatgttagattacatttgggcgtatgaaaggtgaaagtctcagggatcattatttttgtgtgttttgtccaagaaaatggatagatggacaagattgggaggtacatagattgtagacaggaaaaacaagagttctgttttgcatgtttttagtttttgatatatcatcagtcatccaaatggaggtgtcaagcaaacagttggattcttgagtctcacactcagagtttcaatctagagatatgcctttgggggtcttcagcatatgcatatttaaaacccatactgaatgaagatcacctgggaagccggtgttggaagagaagagaagagagaaaaagaagaagagaaaggaagagagaaaagcagaggggagagagagaacagagcatactgctctgaggcattacatcctttcaaggtccaggaggggaagagatcccagtaaatgaggccagaggcatagccagagaggaaaagagaagcatcacactgatgtgcaagaagaagggaaagtgcactcatttgttgaattgtataattcaggtacatactcgattatgcttactttcacatattccaggtaaattgtattaaaaagtttgaaatccccagatgatctctcaggccttgatttaaaatactctcagagtgacaaccaaggcagagaaattatccactgctagttgtctgacattcactttccaaaggcaattcaaaaataaaataatcaaagtaataaaaatatatttacaccaattatgtatttttgttccatacagttagatattttttaaaatcaacagaaaaaatatcacagttcatgggggggatggtgtgacttttgatacactgtttattttctcctaacaataaaacctcattgcgttattcttgccaggagtttgggtgacacctcgacacattatcatcaattctacaacagtggaattatattggagtctgccagaaaagcccaatggcctcgtttctcaatatcaattgagtcgtaatggaaacttgcttttcctgggtggcagtgaggagcagaatttcactgataaaaacctggagcccaatagcaggtaaactaaaagaaaactttaccaatcatacagcaggatttgtacatttctctgggttgataagaaatgcatgtcccactgaaagttgttaaattgtttaattaacttcctcattcattggccattcaataactgatgaaagtgctaaatcattcagtctttagacttcacgaaatttcttaaaaatataaataattcgtcttctgtttgacataaaagcatgagaatttttaaatatacaaaatacatgaagtattaaactttaaaaattaccaaattatcttcaaaaacacgcatccttgaactagcaataaaagagatgtaaagagttttgttttccgtcaactctcttttcttcttgtacagtgtttctctacttgctacaccacatatagttgtgaatagttttagaggaaaaagttccacatatttgcatttcattcccattcatttctcagcagagacaaaaacatatcttaaatcaacagatgttttactgtagaaagtagagatcaatttcattttattgtaaggaatagcagatcaatttaaaaacatctttctctaaacatatttccctgaactccaacctatttaaaaatggggaagattaatttgaatcctccacaatccaccagcacactccaagactttcctgaaatcttcaagaaaagctatgaattactagcaggttaaaaataaatttaagagcagctgaaattacaatggcttggagacaatgttgcctgtgcaagaaaaactaccaagtcaagtttctggaaagggggcaaagagtttgcaatttgtcacaaatttaggactaagcaattgatacaaaaactagtaatcattgttcaagtctcttgtgcatggccttaccacaattcttctttctttttaaatatagatacacttacaagttagaagtcaaaactggaggtggcagcagtgctagtgatgattacattgttcaaacacctatgtcaacaccagaagaaatctatcctccatataatatcacagtaattgggccttattctatatttgtagcttggataccaccaggtaaaaaaaaaaaagaagtatgtgtgtgtgtgtgtaaacattttaaaggaattaattagagataagaatagaactgttaatttagtaaatcagaaagacatagtcggtctcctggataaatatgaacagaaaaatctaaaccacacttctaagtgtatagacgcatgagtacatacatacatacgtagagatataggtatctagatgtcgatgtagatatgtaagtatatacagctttctatgaaagcaacactttcaagtacaagagactaaaaatctttttactcatctattttttttttttttttgagacggagtttcactcttgttgcccaggctggggtgcaatggcgcaatctcagctcaccacaacctccgactcctgggttcaaacaaatctcctgcctcaggctcctgagtagctgggattacaagcatatgccaccatgcccggctaattttgtattgtttttagtagagacagtgtttctccatgttggtcaggctggtctcgaactccagacctcaggtaattcacccgcctcagcctcccaaagtgctgggattacaggcatgagccaccacgcccggcttactcttctatatatccaatgcaagtcatataggtcagaattaccttgaacattcatttccatgggactccttagattggatcattgacattataccattccttttatattaaatcagtgaatggggagtttggaaagacagttgttcacttcacccatgtaccttgggttgtgaccacttatggtagctgcatttttcctctgtaagctgaatagccttcattgagccatttagtcattattgggttgccttgtgacttagtgcaacattatattttgaggtaagcaccatcctcaggtaaaatcctgactgcattaatactgtggagtaaagagtagagtgagaaaggacatatggaggacttttctttccaagtaaaatttaaaaatggttaagatgttaaaaacacttcaaaattatgtgactttatttttaatatctagtcttaagatgaaattgtgacacgccctttttgtcgccatcagaataagtttagccacagttcaaagtggcaccaaatggttaacagccatttgagccatcggtagatccattccataacataattaacataagcctatttttattgaattgaacagtcaaaacaggtactattgtatagctataaagagagcgtaaagacctaatacataaaacttaagtttcttatagaccaacaccttctgctataatctaagatcaaagagaaaaagttattttcccctaaaattcaaaagaaagtttacaaagagctttataagcaaagaaaaatataagttgctctaagatattaaatgtacatgatttcacccacttttgtttaaaataaatgtgcagcatattaaacaaaatataaaggaataattagtagtggcagaatgcatcacaaagtgctataatctttatgttgtaagagcatagatattcttgaactctgttcttaatttcgatagaggaaaagacatatcttctgctgtgggaaatatataaatttacagccccctttacagaatttatttctacttttgtttaattttatttatttatttatttatttatttgtttgtttgtttgtttgtttattttgagaccgggtctctctctctgtcacccaggctggagtgcagtggtgcaatctcagctcacagcaacctccgcctcccaggttcaagcctcagcctccaaagtagctgggactacaggcacacaccaccatgcctggctaatttttgtatttttagtagaaatggggcttcaccatgctggccaggctcgtctcgaactcctgacttcatgatccgcccaccttggcctcccaaagtgctgggattacgggcatgagccactgcacctggccacgattttttagtatatttctccttggcatttttattgtgctgttgtgtttttgcaccacaaaataaaatgaagctggatagagccaatctaataccatatttagcctattgacaagaaagttttagatttagaccagggtcttctacaatccaaattctccaagagcaatacgggaaatttcagggtgatgagcaaggttgatgatttctttgccatatgactgggaagtcccatggtttatcaaaatatctgttattttaacattatttaacatatcagttgccattgctaatctgaagacttcatgttcagtacgaatttgaaaatatctttattttatgactatgcaagtaagagaaatgaaaaagcctggattcatatcccaatactgccacctattagctgaacttaaacggtctctaggcctcaattttctccatctgtgaagtggagataatgatgatacctacatgtaggcaggtagggttgctgtaaagatcaaatgaagtaatttatatgataaatatattatctagttctatataatattctatagataccaatggtgattgtttgaagaattatttttttatctttaattgctcatttttaaaacgtatttgttccaacatttgctgggtctcaaagccccaattttcaaaataataaaaccacctactgaggattggattagtaaattttcaagacctctttcaaatttcccagcgtgtcatttttttctttgaattcaatatcacacttaaatgtttaatgtatcatgtttccatttagaaatgtatcattgtggaataaaacacaactttcacttgtttaatatgaccttaactctcacatacctcaggctttgtataaattgttcattctggtccagcctaggggatattgtagaatgctttacacactaactctgaccatttaaccaatggttaataaatctataatattcagacctgtcaatcttatagtttaagatgcacagaatccatttcagaaaccatataatataaggaaagattaaaatcttcaattaaatctttttcctggtgtctagaaggatttcaaactcagtaaacagtcagatgattttgacttgtgtataatctacagttgattttattggaaagtacctcatgctgtgttttgatttggataataaaaacatgtttctattcctgaatagtcacaaatatatatattttaaacagaaagaaaataaatttgtaagtggagattgtttatttgctcacaatataaagagttttctaggtattcatcatactccctgccattacaaaatgactacatcacagacagagctgaataatgggcaaaacagtccatgcctgcagttcccaaacctgaatgagcattagaatcacctaggaagcttgtgtaaagacagattctcaaccccaaatttactgaataagaatctcctgggatggagtcaagaaatctagagctttttaaaaactccacatatgactttgatgtgctaccaagtgtttttgaaatagtagcccagaggaccaaggaacagatctaggtattgctgaaaccaaatgattctgggagaacaatgtttgactgggtgtgtagtggcgtgccaagactagaagagttaattgtggaaaatggcaagccgctgaagggaaaacagccacgtgacagcaatgatctctgcagcatgaagaaactagtaactagaaagctttacctacccatccaaaaatctaaaaggaatagatgtgatttaccaaaaacatggatcacactcaccaagtgagactggtgaattacaataactgttttctctgaaaacatgagtccgccagtttctcttgaatgtctaaagcaagcttatccaacctaaagcccaggatggctttgaatgccacccaacataaattcaaaaactttcttgggatctttgcaattatttgttttagctcatcagctattgttagtgttagtgtgttttatatgtggcccaagacaattaatcttctttcattgtggcccagggaagccaaaagattggacactcatggtctaaagccaaaatactggctaaattgtatttgtttttttaaatatgcatttttttttttgtggtcagtgtgaacagagtaaccttagacaggtaagctgctgggaaaaaaaatgtctatgtggttacttggcaactgaaaaattacctaagcaattaactgaattttcagttttcaaactattgttctaatgctataaataaactaagccttagtacatgtttataagtcctactagtgaaagggtaaggtctagggaatagtgacaatacccaggggaagagtacccgtgatactgataacaaatgtcgtgtacatacgttcatattacttggtgtatttgccatttgttaaattcctactatatgccaaacactgataagctccttctctgccttacctcagttaatttttatgcaaacgctagaagacaggtaataatatcattatccccatcttaagataagaaattcgaatctcaaaaaagtaatataatatgctcaaggtcacactgcagagccaggattcaaattcaggtctactgtctgctactgccttttaagaccagttcctttctgtctttggcttaacccttaaatccaaatcgacttttcatttcttgaccaaagtctctcagatttatgatggatcaactatgatgtttgaaatagtagcccagagggccaagaaacagagctgggtgttggtgaaaaccaaatgattctgggagaatatttttttttaattttttttcttttattatactttaagttttagggtacatgtgcacaacgtgcaggtttgttacatatgtatacatgtgccatgttggtgtgctgcacccattaactcgtcatttaacattaggtatatctcctaatgctatccctcccctctcccccaaccccacaacaggccccggtatgtgatgttccccttcctgtgtccatgtgttctcattgttcaattcccacctatgagtgagaacatgtggtgtttggttttttgtccttgtgatagtttgccgagaatgatggtttccaccttcatctgtgtccccacaaaggacatgaactcatcattttttatggctgcatagtattccatggtgtatatgtgccacattttcttaatcctgtctatcattgttggacatttgggttggttccaagtctttgctattgtgaatagtgccgcaataaacatacatgtgcgtgtgtctttatagcagcatgatttataatcctttgggtatatacccagtaatgggatggctgggtcaaatggtatttctagttcaagatccctgaggaatcgccacactgacttccacaatggttgaactagtttacagtcccaccaacagtgtaaaagtgttcctatttctccacatcctctccagcacctgttgtttcctgactttttaatgattgccattctaactggtgtgagatggtatctcattgtggttttgacttgcatttctctgatggccagtgatggtgagcattttttcatgtgtcttttggctgcataaatgtcttcttttgagaagtgtctgttcatatccttctcccactttttgatggggctgtttgtttttttcttgtaaatttgtttgagttcattgtagattctagatattagccctttgtcagatgagtagaatgcaaaaattttcttccattctgtaggttgcctgttcactctgatggtagtttcttttgcagtgcagaagctctttagtttaattagatcccatttgtcaattttacctaggcaataccattcaggacataggtatgggcaaggacttcatgtctaaaacaccaaaagcaatgggagaataatattttactgggggcatcaaaaccagaagaattatttgtggaagtggtgagcccctgaagggaaaatatccacattgcaacaatgactttttgcagcgtgaaggaagtagtaaccagaaagctttacctacacattctagaaggaatagacgtgacttaaaaccagattccaggtgtaggaagattttagttaggtgggaggggaggagagtcacttctcaaattgctgtaaagagatcatccaaattctattttaaagccttggtaaatattcccctgtctcccatgtaaaccttcatccactttaccttattctttcttgataaatgtcagtagtaacattaccaaaacactctaagctctagaaaatcaagatctctagccttttgtgtatcatttgaacctctaaatcaggtgacatacaaacaacatatccttataaaaattttgctgaattaatggaggaacacaatggtgagcgagcctccacaatttattatgcagtcaaatgtaaattgtggatatcctgccatttaaaattactcaaacatttgattttctcttaaagtcatccttcgtctacattaacttaatcttaaacagagacatacacacaaagagagagagaggcagagagacagagagagagagacatttcttctttaatgacaaacagagcacatacacatattttccaaagactgcatcttgtcttatggatgtgcaattttttcacctttcagaaaaggtggtattgttttctaacatggaatgggcttcactatttagttgtcctctggccttgggcaagctgcacaatgtttctcaaattcaggtttctcatctgtacaaggagaaattaaatgcctaccttatattgttatatgaagtaaatgagatggcatggtaaaactccattattgtttgaacctttaggtaatgtaaacaaccttagattattcctaagcattccctctcaccttttaccagctctcaacattgggtcaggacttttgtattcatattaaagagaacatttatattaaagagagcaaaggatatatgttaccttaataggtgaaaaattatggaaaattaaatagcaaatgcttcatggaacataagtggtttactcagaatgacaatggagatagatatccctgctgtttaagaatctaaacattcaaaattatttaaactctgaaggtaataatgagtctttctaatttatcgagatgatgactatattttgaactgttctagcccttaatcatgttctaattaacaatgccattgcatttaacacatactttttctcactaaggatggtgagtcatttaggtttaacgtacaatatagaaatactggtgcttttcctttaacattaatatcttactccattaaagaaggaattagcaagaattctactgataaataatttttattaatattgctctagaaatacaaatttttttatttatcattttgattaaaggttagctggccataatatggtctatttatggacattagacatcttggcattcagttaactcatcagctgcagtgtattatttcagatactatgcatttaaagtcaaaatttacattaatctttctaaaggattcacattacattaattgggatgattcaacattgacagttgtttcacttttcttaacttataaatgcaataaccaaatgacaaggagtggtgagtttcagaagaaaatgtgaaactcacttcagtggtttgtattttattttggatattttaaaatgtatctttcattactgagctttaatatatgctaggcattttgctaagagattaacatatatctcatttagtgttcataataacttaatatagtatgtcctattgttttgctcattttactaatgaaaaaggtcaatttagacactccaagctattttctctaggttattcttcaagcaggtgtcagagcagggctgaccctcatgggtgtgagtccaagtctgactcaaaactactattctatattttctcaatatttttccacctaaacgtgcggaaagcaaatgatttttcatgagttctactgtaatcccatttaaaagctaaaaaactgatttttgctttatatataggaagtatgaatgaggacaatgtaattcaggatcagtcgacccagtaacccaatagaataattttatttgtggctcaaaacttcatgagatgtaattcatttgcctttgggtatattgattcctctagtcatttaactaacgtggaaattatttctgagccccactcaggggcaaaacatgatgctggacaccctaaaagttacaaagaggaatgagacactgtccctcttgtcaggaaccctaccatctagtaaggtagaaaagacataaatgataactattatacaaccaatgttaaatttccatacaattggtatgaatgagttcaagagggtcccgttttacttctgttcccccaaaaaggcctaatcaaggtttccctacctatacagtggagaatttagctcgatttgttaaaagcaccatgttaagtgcaaccaagtgttttgaaacaaatgcctctatcaaaccgaattaatagtttttcctcttagaatttttcctgttccagctcctaaaaaaagacttaaaaaggattattgattgacttgtcccattgtaaagtatgcacctgctgtgaaatgaagccatggagaaaaatagttgaataatttaacttttttatttgtaaagataatcagggtttttctgattacatcttaacttcataaatgttaaataacctatcagcatctagttgttgtaaattatgaaaaggagcattgcaaggaatattaaccaacgaaatccttgttctttagtgaacaagaaaatgtgttatggcagcttgtcattgtgcgactggtaactttgacaccaaataacaaaactgccatttgcacttagggtaaattggttcacttgagcttccactgctcctcttgctctgacataaatttatgaactcaggaactaaccaagtcgtgtggcttcccagctgactttaacaaatatgcccatttcatttcatttagtcatcagaataccagggggctcagtcatttcagactcattgcagatggtatagggtttgtaggaacaccagagactttcgtgtcacagtcctggaaattatgatagtggagggggcccactttcctaaatgcatgccagtgttttacgtgttcacagcttagaggagcattttctgtttcagcacctcataggtatatgtaaaggacatttatttccaattaatgaagaggtgaaaaatacattttctatgctcatggtttggctagccatgtttaaatctggattaagattatgtttatatttgacatgcggtagaagcacagttttgttccttcatcctctgggagtcctgtcctttttataacagaagttacttcttgaaggatgcaaggcctggaagcagaacagtaggtacagactgaagacataaagtaaaacaacctcagatgaattggagggaacgccactccaaattactgctaacaatgaataatacagtattttcgtaggaatgcaatttgatcatatccaagtacacataaaaaataaaactagataacaaaatagtgttacaaagacattaacttgaatgaatgtaacatttatttgtagttggaatagcaactttatatgaaagatggattcaaaagtgtttgagggcacatggaaacagtgccatagttgttttttgttctttatttcattttgttccattttgtcttgtagagatgtcagccatttattaagtactttctatgttatgggaatatattgaaaggcttacagatattttctaatttaatcctcacaactctctatgaggtagctattagtatcatcattttacacatgaagagacaacatccatagaggttagttaatttgccagtggtcgcttgggaaataagggcagcagaaggatttgatctatctgacaccactctgtggtttgtctagttcaacaagaatgatggcatgtttcttatgaatgtgtgtctgtcaaacttttctgcaagaactgtcctaggaacaaagaagacaggatgaatatgcaatcccaggaggtctgaaaacagagcctgaagcaatcatcattagcttgcagtttctttaaggtcttgctttttatcttaaaaattcatgtaaatttgccattgtattccagtgtttgtcttcatccaaaaaataatatattatacaacttatcatttgggaaaacattttctactaatctcattggctaaagagtgataatgctgttatatttcatgatattaggaagatctaaagaaaactaagcccaataacaggttcaaggtcccggcaattcttcccctcttcattttgtcataaatatgtgggttcaccgtgaggcagaggttgcagtgaaccaagatcatgccactgcactccagcctggtggcaaagcaagacttcgtctcaaaaacaaaacaaaacttgggaggccgaggcgggtggatcatgaggtcaggagatccagaccatcctggctaacaaggtgaaaccccgtctctactaaaaatacaaaaaattagccgggcgcggtggcgggcgcctgtagtcccagctactcgggaggctgaggcaggagaatggcgtgaacccgggaggcggagcttgcagtgagccgagattgcgccactgcagtccgcagtccggcctgggcgacagagcgagactccgtctcaaaaaaaaaaaccaaacaaacaaacaaacaaaaaaaaacaaaaaacctgtggcttcaaacaacagccttttattcctcactgctttactgttatggcagggtaacaatagggagaaatgcccaaaatgtgatatggaatgctttgtcattctaggatactctggatggaaatttctatcagcatatcctcctgctgaaggtcaaattgcaaactgagagggtccccgattccttcttcaatctctcttaccacctcaagcaacaccctccaaaaaatactttttgcggagaggaagaagaaacctgattatattactttttattttacctctggcacagtacttaaatttttctcatccattaatgaactgagtctcaaatggtctctataatcaattctccttatccagctctcaaatttcattttaattattgcagtcttgttgagagcagtaaaaactgccagttttgtcgtggagtggtgaattaggcctcgaagaatagcctttaaataggcctattatgtgtattcaccataccagtaaagagaaaaataaagttattttttaggcatttaatttttgttatgatatcttttcctgtttctttatggagaaaaatagtatagaactctttattacctgaaacaaagtggaagtgtcatgggtcaggccaacttttcatcccatgtctagggtagaaaatccacattgagttcactttaaagcaatagcgagagactaacattacattgtcctttggttacagtatgaacagttatacttgttcagcacactggcacatcagcataaacattttcttgtgtcctacagttggttcattctgtggtgactacagagtcttcaactctacaattggctagcaaaaattctaatcactcaccatacatacaattctctaatcttgaacttttagaaagaaaaattcacacccaatttttgtgaacaaagaaacggggattctgctggttccccttcctcaaacagggaaatcctgtgtttcccaaattttccatatcaaagtgatactccaaaaaaaggcacagtaagtccttaaggtcatgataggttcttggaaactgcaattttgagtcaaaagatatataaggaaaccaattttaccttaggctagttgatataagcaagatttaagttgcaaggaatatttgtggtcacaaaaacgtcaccaaactaaatatcatcaaagaaagaccaaaacacttctaatattaaactgaaataaatatgagctatacatacatttaagaaagattaatagaaacaagtaagatcatttttaacctaagttttggcaagtcagcgagtgacaacagccatagggataaatgtttttgagcagaaattagaagaaattcttcttaccaccatgcactagtaaaaacaatcgcaagtagggcaagctcacagaaggcttttgtacagcattatttattattatgcatctatatgatagtaacacacttaatgaatctttactttacaattattcattcattcattcattttctgacacaccttttccagttcagggttggggtggccagggcctaaccaggcagctcaagaccattccgttacagggcacacacacacacccacactcgctcagactaggaccattcagacacaccaattaatttaatggaaacatctttaggatatgggaaaaatccagagtacccataaagaaaccacgcagacatggggagaatgtgtaaatttcacatagacagtggctccagctgggaatcaatttttttcctcataaatattaatgaaacaatgttgaatgaaacaacattattcgaggacctacggtactatgtttgttcctgtctttgaatatactttgacatgagcccacaaacctccaaagcaggtgtatttcaggttgggatacttggtctgcagaactttaaatttctacctataatatgcttgttccatcagtaatgatttttacttatccatcatttgtttccttgcttcggaatagtctccaagaatggctctgccttactgcacaaattttctcaaacctatcttgtcatttttccccaagttgtcctactctaagactccattatcaaggaaaagcataagtatattgatataagtgttgatatcagatgggcctaagttcaagtccttgcttctccaattaatcagtgtgcaatctggaacaagttatttaacttctctgagttttagttttctcatcttaaaaaatagtaatatttaccatgcagtattgtcttgagggttcgttcattcattcaatcagctaacatttattgagctgctactttgtgctaaagtctaggcagtggaaccacattggagaaaacaaagtcctaatttatacggttgacattctagtagtattaaatgggataatgcgtgttgcctggcataacacagggatgcattgaaatgactcttgtttgtactacttctgcaaacattgtaagactttcaaactggtttccctatgtcttgtctctcatgtttttaagccactattcatttcccaacagtgttatcattctaaaatataggtagactcttattttcttatttatacctgcaaagtctccttgttgctgattatatatgaagcccaaatttctcaaagaattaattgataaaatttagtagtcacttgagttttggagtgaagaaggcaggatccactctaaaagtcttactctaagatttccatcctaggaaaatgggaagatggtattatgacttactgaaagaggaaacctaggaaaaagaacaggtttgggagtggaaaatacagctagttctgttttagaattgttgagatcgtggcctctgaggaatatccatgtagaaatacctagcaggctgttgaaaatacaaagctgtaataccggaaagatagaaagctagagataagagtttaggaatcaatgatagaatgttagtagtttaacctactagaataaatgtaccagatagtttagccatgatgctctaaatttaaaataaacattctcagtctaagctgccaaatttaacgcaatctagcacctttcctgaggaagcaattgatcagtacttctgaagatgatcaatatctccttcagacacctctttttcatctatcctacacaaaatcctgagcatctttggtttgtaccagctcttccactctgtaaatacagaggccacatctataaaaagcaaaaccacatttcattctttagacctcatctctcttaggtcattgagtcctgtgcttcctcagtaatgttatctctagattccactgtttctaaagtaaagatagacttatgtgggtactacagaagtaaataactaaactcataaatgttaaaaactctcagatcaaggagacaatgtaatagaaaatgccattatattcttcattcaaaactcatatcctctccttgaaaaagtatgcctgttgttcatgaccaaataaaacttaacaagcatttaattatataaatagactttgacgaggctaaactgacaagacctactttctttaggaaggaatggtgaaaaatgacaattgttgaacccaaattttcgctgtatttagggccataagtctcactgacagtgaactgtcctggcccaataattaatgcactgggaattctctaggtagaccatgatttggatatttcatgggctatgtcaaggatccatgtcagacaggaggcatacacaatgctctacagaaaaattattgtcacaagcaaaattggtgttgttttctatgaactttaaaagtaagtaaacctagaaaaaatataggacagcataattgccttatatgttttaagtgaaatgtgccttcatttttatttgccaatagagtatatctttaaatagaaatattatgcttttaaaaatagattatgtacatttcttacttttggaatacacaatctaatatttgccaacttaacttttgtgaagcttttaattgctatattaaaaagtaatttacttttctattacaactttttttttttttttggaggcggagtctcactctgtcgcccaggctggagtgcagtggcgtgatctcagctcactgcaacctctgcctcccgggttcaagcgattctcctgcctcagcctcccgagtagctgggattacaggcacacaccactatgcccggctaatttctgtatttttacagggtttcaccatgttggccaggatggtctccatctcctgaccttgtgatcagcccacctcaacctcccaaagtgctgggattacaggcatgagccaccacgcccggcctcaattacaaaattttaaatagacattatttttaaaagacaaacatttgttgcccattctgttttatttatatatatatgtgtgtctatatatatttatttatatatatatgtgtgtctatatatatatacacacacacacacacacacacacacacacatatatatatatatatgtttttaatgttctctctctctctctctctttaaagggatcctcatccccgaaattcctgtggagtacaatgtcttactcaatgatggaagtgtaacacctctggccttctccgttggtcatcatcaatccacccttctggaaaatttgactccattcacacagtatgagataaggatacaagcatgtcaaaatggtgaaagtctttcagacacttggcctgggcttttatgaaaaagtatttcattaaaaaatttcattaaaaaggaatacattctcagtccaaatataaagactaacgtttcacttcttatttgtagtggactgtttacccagaaaaatcacagtctggcatcgagtaaagcattatgcatttctgcacattaaatcataaatatttaaatatattaaaatggtggttttgcaaagtcttgttttataaggccctttgaaagaaaaacacctagctcacataaaggagtctttggtaatataaaacaaaaatgagtattccaaatatttcatagaaaacatatttaccttggccttatttaaattttatccaggaggaggaagtgagaagttatttaagagttgaattacacccaaatgaatcctatatattttatagtgcttccttgaaccctattcatatatacaaactatcaccttgtgtttcatggcttaggctgtggtcagtgaaattttcatgtatctgtgttgtgttaaggaaaagcctcccccatttcctttatcactccaaacggataagtagctaaatgtaaactgtgatttaggaggggagaacagggaatcaagagagctatacatcattttatttatctcttttaaattaagtataaactttaacagatatggatatgttatatatgtgtatatcatatataacatgatatatgtgtatatcatatataacatatgatatatatgatctcatcatatatgttatataacgtataatactcatttgctaaataaagaaaacatgtaacttaccttagtataaaaaacattttgcttcaccttaaagaaatttatcagactcaatgtgtagtggaaactcctgtattgaatgtccttaggaatttctgtttccaaatagtgctagttctcatggagttggttagaattatgagtctgcaattttgctctgctgaactcatcagaaatggctagtcagtttgtccttttttctctaaaaaatagaccatggcatttttgtttgaggggtattgctttctctgatctgtcttcacctgataaacgtgaaaataattttaaattaatgttttcttgactcaagtacaaagtcaacgtctgcatctccgtgtccctgaaactgtgcaatggaggtacaatatccttcaaatagattgttttattcctgtgtgtttgaataatgttcatgagtttaaaatattggcaaaataaaatattattaaaagcatgcaagatgtgtaggtcacacatacacttgtgaaattcaagtgcattatcactttctggttagaatgactataataaactagagaaacttgagttcagacaagtttccttattattccttatttccagacaatatgccttattgtttatgtctatataaatatgtgactaattaatgggttttccaaaaataattttctatttaaatgttcaaatcccataaaaatttatttaaaacacatgtacaagtatatatgcaaaaggacaggttaaaataattttcatgatatcattacccttctgtatgaatatgtagttcttttccttgcttgaaaaataataaagacctcaattttttttttttcaaggaagttgtggagttagcagtaggatgtttgtcaaaacacctgaagcagccccaatggatcttaattctcctgttcttaaggcactggggtcagcttgcatagagattaagtggatgccacctgaaaaaccaaatggaatcatcatcaactactttatttacaggtaagattggctgttactattatttttagttatttaagaatgcgtactgctccaacacagcagaatcaagagcattttatatttccataagagaatgaatgggaattcatgttgtgtttttttttgttttgttttgtatgtttgtttgtttgtttgtagcacctaccagtgaggactaagactggtgctcaaacttttacaaattaaccaaggaaaaaagccataactgccatataacatttttgattgagatctgtttgaaaactgagaccttatagcccacataggcttatatttagtgatggggcagaacagtcctctaaagcaggggttcctaacccccaggccacagagtccgcggcctgttaggaaccgggccacacagcaggtgagtggctggtgagcaagcattaccaccggagcttcacctcctgtcagattagtggtggcattagatactcacaggagtccaaaccctattgtgaactgcgcatgtgggggatctaggttgtgccttccttatcagaatctaatgcctgatgatctgaggtggaataatttcatcttgaaaccgtacaccctaactgcattgccccagtgtgtagaaaaattgtcttccacaaaaccagtccctggtgccaaaaagtttggggaccactgcttaagcagctcactgaccaagaaaacatagtctttccagagaggaaaccagatacaagacaagaattctaatatttctcattaattattatgtagagattaaaaagttttttctcctcctccaaagatggtgcttttcataagcagaaaaaggggctctcctctccagttttccttctgttttaatgagcctccactccactggttagatggtgttatagcaacttgttccatcatgtgcagaatttattaagtgtacctacctaaaataaagaaaagagacaatagggaagagaggaagagaaagattgaggaaaaagagagacaaagagagattgagagagagagagagaaaataatggaagagagagatacactatgaacattttggtttgaaggatattttgctctctgatctagtcttcaccagatcaacatgaacattgctttaaattaatgtattctttaaataaataatgaatgaggaggagaaggagcaggcaaaggaagagaatgagggagagatggagggagggagagaagaagagaaaaaatagagaaagtgaggggaggtgagtagaaagtacaatgcaaagagccaagggggcaaataacctgtcaactgatggcttgctacttaagacagaaaatacaatcattggtagacatacaggacttgcagattgaaaaacccaatcccattctgaaagcaatgtatttcctttagcgtacaaagcagaacacccttcttctcagatcctcataccccgcacctcttcaacatcctttgttagtgtctctagcagcctcaggccttcccttatttggtcctatgccctggaaacttagtgaaacttacttaggctcctcttataactttagatattgaaatcctttgattcacatcagtcttcagtgatgagctaagggcttatagaaaaaaattacgaaaggagaaagtattattgcatttctggttatgtaaatgacattaccaaaaatgaacaagccaaatttcttctcagcaaacattaatttgaagaataatatttctgattcaaaaacacatgaacacgtaaaaatggttaatgtgaatttccattttacgctaagcacattagtgcaggctctaaaatgtccaccctcttgaaatagttttctttcatccacttaatgctaattgcatgagaaaagcacatcaaattcctattcagaataaagggaaatagagtatctgttatagaccaggacgtggcttcactctgttggttttgtaaataaagctcgtgattacagtgcctattccatggcagctatagagagggaaaacaggaaatataatgcagaaagcccgcttcaatgaaaaatactgtaaattgaatttgacagcatttgatggcatctgattattctaatcacagccaaacaatgatataaagagtaatatgaaacagaatgtgttactgcctagcagactcaaaagcaataaaccttcctccaatgtgacacaatcacttcacaatcataattgtagcctgtttgatacctctgagtacagcagaagggcactgactgacatagatacattttgttttttatttaaagtgaaatgaaaatggcgcactggggctccagatacaatcgttatattcacctacataggcatgaatcacttggcagttatttcaactgaagtttaaatgtgcttagacaacaacaatatcaaatttttcttagatagctgcaaaaaataatcagaaatttgtaaggacagaaatagaatggagacacatagttctttttcattctgagactacatagagccctttatatagttatagccaccagcctgcagtatttctgaggaggttatggcatgtaatttcagcttcatcattggccttctctttcttctatcggcaccaaaggaagtacatttagctcaaaccaaagataggatttggcctatgcagatatttttattaacttgcaggaagcccacttgtaaatctcatttgaaattgtttgccactctcttctcaccaagaccctgaatcattttcttttctgtaactgtcctttattttttaaatatttcctctagatattatcctattaaaaaatatctgacctaataaagacagaagatgtttatgacttcaaaaacaaagcaaaataacctaaatattatcctattaaaaagcgtctgccctattaaagatagaagaatgtttataatttcaaaaacgaaacaaaataacctagtaagaacaaactattaatatgattccctctgcttagtttatctgtttaagctattttgttgactatatataagtcacaaaaaaagatttgctacaaaaagttttgtaaagaatagagaccaacatttaagttagtgttttgcaacctgtttattgactgagtatagacaagactgtcttggacatctgcttcctcctctcaatgagtttggctggtatgataatgattcttcagtattccccctttattttatatctgcaaccttgcaaatggcaaaaatctcatcacttacgtctacaaaatccatcaaacacattaaattgagactttacaaaacatgtaataaaataatctcctcccactaggtgctttaattttaatagaaaccaaatttcatggggtttattattctcatgagctttctctttaaataaataaaaagatttgatcaatgtgcactgagaggcaaaactatatacaaacaccctgtaaatgctgtaaaaatagaaacaaatgatggcacttccttctgagtatttagtaagatttaaaggataaaatctgaaataattttgaagactgtatgatatgaaagggttttcaaagcagataagtgaaaacattttataaaatggataattaagctgattgaattaactaagaaaagacgagcattgaatcaaaggcaaaggaattttgatgtaattcaatttgtattgggtggaaagatggatatagatatgaatatttatatagatagatacagacagaagacagacagacagacatctacctatccatacatgtacatatctactgagagagacacaaagatctatgagacctaagcccttttaccaatgatcttcactacagtgggagatataagacaggctaaataaacaaagaaaagagtaaaatatatagtggaaaaacagaaatatttaccagaaaatttagagaataattctgtgtctagaatattcatggaacacttcatcaagttgatgtcattgagactaggacttataaaataaagatttaatgactatttaaattgtaagagaaatacatttgttagaaaaaatgttttaacagtacagaagattactaaggttattattcattcttatgatttactcatggcatatgtaattttcactaatagaagtaacactattaattttaatatattaacattaatgttttctatttgtattttcttcttcatgaaagaattatattgcccatattgttctgcaattttctttgggcattttatatatatgcccacacacatatacacacctaatttcttttaatgactcatcaatattctgttatatggatgtgtatcatatattatttagccagtaccctgatgatggcaagataggtgattttcaagttttcgttaccacagcaattctctaataaatattcttacggtaagtatacagagaattattcttagtactagaagtactgggtcaattaaaattgttgaggatttgtctttactagaccatatgcatttaaaattgttgaggattcctaagttgtcttccaaatatcatatgtaagaatttctaattctgaaatcttttaatacagggtcagtcttccaaatctgtcagctcaatattttcatttgcacatttttgttgttttaattcaagttttgatgattataagtaagattgttcatttacttaaaatatttatcttctatttgggaggggtatgtataatatattataaattcttagactaattttttctactggattatttcttattgtctatattctttccacattaaagaaaatctccctttcatgatcatattaaaaataacacattaattatttcttccagcacttttatggctctactccttatttctaaatatggaattaatattgttattggaaattagataagaattcattttcttaaaaaatgctaactagtttatcaacattatttcataatccactgatttgaaatgtcactcatacaaaattcctatgtgcatcgggttcattttaggactttgtattctgtttcacttgtggtaaatagggattttaacaagtacagcctgatggtgaagacatgataagtgaataaaatcaatagaataagcaaaatttccaacacataagcataggattcaaggaatggtcaggtttatctggagtcattgctattagtaggggacatttagaagatcagcttaatgatagattttagatctaaggagtttaggctttatattcagaggcaatgtgagctgctgaaggtttagggggtaaatagagaagcaatgtaataaagtggaaagagtgtggcatttgtagtcagaagatatggcttccagggcctggctctaacacttactagttatatgaccttaggcaagtcactgtgttccctaattttccatttttacatgaagtgaagatagtaaatataaaagataattagcctcttggaattctgtaagaattaaataatatgtgtggaattactgttaaatgtgaagcatgataaaaatagaaagttatcctagatatgttgtccaaagccatgttttagaaagacaaatccatctggcagttatagatgtacatttaaagtcaatgaaagaggttcatggttataaaagtagcagcttgcataacagtatgcctggtaggattctgttttcctttaaatatatagtatattttttacatatatatgtatataaaaaaatgtctggaatgttaaacaccaaaatagtgctagcagtgcttatctccaaatattaggctatcagtgattcttttaaatacttctgcttttgttcatctgtgttttcttattaatttttatagtcaatacatcatatggtctagtaaagacaaaataataaatttgtgagcccagatgcaaatctatcatcactgtctccgattttcctatttccttctttgtgtgaatatcaccatcactttctgtaataatcaaagtctgatcaagaaagaggaaccacactacttactttaacagaaggaatttaatataaataattagtaagtagttataaatttgttaactaggtaactaaaagcataaaaagagaactctaagatatcatggaggtggcaactacaggaaacagctagcacctttagaactgagggaacaaaggggagttgttagaattattaaaatgtaaatgcatagaggagggtgcctgtgaagctgggactcagacagttgaagaggggtacctgccactggtgcagttgtatggaggaggaaacatgaaattaagttggttttccaaatgtcggaaaaattgcatgctgcaatcacttgctcccaaggtatttctttattgcaacacaagaacagcctaatacagaaaactggcaccaggagtagcgtgttgctatgaagatacctgaaaatgtggaagtgactttggaaatgggtaacgggcagaggttgaaagagttgggagggctcagaagaagacaggaaggtgagggaaaatttggaacttcttagagactggttaaatggttctcaccaaaatgctgatagaaatatggacagtgaagaccagactaatgaagttggagatgcaaataattgagaactagagtaaaggtcacccttgttatgccctagcaaagaactaggttccattacatccatgccccagggatttgtgaaagtgagaacttaagagtaaaaacctagggtactggtggaagaaatttcaaagcaacaaagcagcattcaagactttgcctggctgtttctaacagcctacaatcagatatgggagcaaaggaatgactcaaagttggaacttttatgtaaaagggaagcagagagcaaaagttcagaaaatttgcagcctggccctgtggtagagagagaattcaagcagactgtggagtgaccactttcaagagagactagcatcactgtaaggtagccaagtgttaatatccaagataatagggaaaaggcctagaaggcatttcagagatcttacaggcagcccctctcaacacaagcccagaggcctaggaggaaagaatggttttgagggccaggcccagagccctgctgccctgtgcaggcttgcgaactgttccccacatcctgactactcttgctgcagctgcagctcgaagggcctcagatacatcacaggtaggtgcttcagggggcgtacaccaaacccttggtagctaccatgtagtgttaagttggcagatgcacagaatgcaagcatgaaggaggcttggcagcttccccctagatttcagagaatgtatgagaaagcctgggtgcccaggcagaaggctgccacaggggtgaagcccttacagagaaactctactagggcagtgcagaaggcaagtgtggtgttggagccaccatacagagtctccatcagggcgctgtctgttggagctgtgggaagggggccacttctctctaggtcccagaaaccatggacagcttgtatcctgaaaaaagccatagggattcaactccaatatatgagagcagccacagggtctgcactctgcaaaaccacagggttgaagctacccaaagccttaggagtcagtgcttgcagcagtgtgccctggagtgggacatggagttaatggagactattttggagctttaaggtttaatgtctgtcctaccaggtctcagacttgtgtgggccctataggccctttctgttagccaatttctcccttttgcaatgagaatgtttacccaatacctatatccacattgtatcttggaagtaaataacttgttttgattttataggcttataggtgaaaggagatgagtctccagatgagattttagacttggtacttgagacttggggcttttgagttaatgctgtaatcagttaaaacttcggggaactattgggaggacatgatttcattttgaaatgtgagaaagagatgagatttgggaggccagtggtggaataatatagtttgtatgtttgtcctctctaaatctcatgctaaaaacagattcccaatgttgcagatggggcctagtgggaggtgattgcataatggggtcagatcccttatgaatggtgtagcaccatgcccttagtgataagtgtgttcttgctcagtttgttcatgatgggagatctggttgtttaaatgtctaggactccacccgccccccgcccccccgccacctctctctcttgctcctgctctctgcacgtgatgcacttgctctttcttcaccttccatcatagttgtaagcttcctgagtctctcataagcagatgccagcatcatgctttctgtacgccctgcaggactgtgagccagttaaatccctattctgtataaattagcttacctcaagtatttttgtagcaatgcaaaaggagcctaatacaaattagaaaaaagaggtagcacatagaaggatatgataactcttatttgagagaaaagcaaggaaaagactttctggaaaaagtgatatggggctagaattttaaaagacgagttgtagttagtctatagaaaaaaggagaggccaggtgtggtggctcacacctgtaatcccagcactttgggaggctgaagagggcagatcacaaggtcaggagatcgagaccatcctggctaacacagtgaaaccccgtctctattaaaaatacaaaaaattagccaggcatggtggcaggcacctgtagtcccagccactcgggaggctgaggcaggagaatggcgtgaacctgggaggcggagcttgcagtgagccgagattgccccactgcactccagcctgggcaacagagcaaaaaaaaaaaaaaaaaaaaaaaaaaaagaaagaaaaaaggagaataagaaagaggattgggagggatattgccagagaattagcagataccaaagccatggaaccgtgaaatataatggaatataagaaactatagtcaagcatttgatgataactagaatataaaatgggactagaaatttcagaaaggtgagtccttttgagaatcagcagattaaggataagcataggccattttacatggtaaatctctaaagaatttttaaaaggactgtcttaaaatttttgaaaggtttgtgatgtctcttccctcaacagccaagtctctactcacaccaaaaacttgacgattcaaccttcacaaatcattttgtaaatcacctgtgtttccatttgtcctctcagcaatctagttcagggtctgcatttattcttacgtaaactgttgagatgacctccttgttcaatgccagatgcacatcatctccatgataacttcattcagatcatgcattacattttacccaatgatttttatgttttaatttttataagaattttcagaggtttgttatactctatgaggttattaactccactttacaaaatgaaatagaaactagaggacacagacaggcaagttcacccaaggtcattgaactaagtggcagagccaggacctccaacctatctcctctgactacagatgtttctgattatctatttaaactcagaatatttgtaatattcttcatggaatggggttggcagtttcataacctcaaaattgttatggtgcattgggttctaggattttgttttaattgcttttgaaaataagcagtgacaattgctggaggggagagaaggagtaaggagctcctaaaagcattgtacattgagaccacagaagtgtgactgcctttaaaaatatatggttcctagtttttatacttatttttgttttcctcttagtgttaggcaacattaaattaactctagttggaaaattacattcctgaagtatctcccaaatgagcctgagcaaagaataaccatttggctattcagagagaactgaaaatgtgatttctctaaacacaggctactcaggaggaaacacttccagttaaatgaacaggtgatgcttaaatcttaaataattaggaataattgtggtctactcaaccacttctgctctaaatgtattcagacataaagagagactctgttttttagcagtgcagatgggacatgtacttctccacgatattaatttttcaaggattcaatagcgataagaaatacttaaccaggctgcaccttttaattcttttggtgaataaacttgaggccaacataatactcaatcttttaaatagtatatgtatttaaaaccccacttttaggcaaattttgttaagaatgtcggctttatagaaaccatgactacatctcaatttgggaattcgtgagagtttaataaaaattaattgaattgtcatggaaaggctgaagctagacaaaatagaaaatgttacttccccatagaccatcataggtttgtttgctgtattgtgttcctagcaaacaactttttaaaaatcactgagaagagtccttggctatgagccctgcagttctcattagaatggatctctcccaatgacacacctggtacctgatatctgtagcaagtacaaaggccaaaccctgcaaaccttcactgagtgcagaatctggttcacgcatggtagtgagcaataatgaggtgggctgccgaaccataattgcaggtgactgagaggtgtctatgaagcctctatagcttccagcatgaagcttgtcattgctcatacttaggtcatcgtgatttatcaacttaaggatcatcagattcccaaagccaaagattttacatattctgcctttttgtgaaaggtaactgtcattcactttgtcttaataaccctttacattttgatggagctggttaatctgatatggcagcatgtgaatttttcagcatctgaagagtgtgttaattaaatacttctaacagcctggaaaatattactgtattcatcactctcttctcaactagagagagagctgaaagaggagggtcaatgtcttggttacattctctcccaacctggaatactgccctgataggaaataagagctgatggagaagaggcaaagatgcagggaagtaatgggattccataacttttagcctttcacttgaaaaacatgattgaacacttactgggctcagatgctgggaatatagagatatgccaaccacagttcctccagaactttgctttccatcaaacctgcatcatgtttttacatctggatgagaaaagaactgttccaaatgaagtatcagatatatagggccgtctcaacaactcaccattccatttctcttacttctatatttaatgctatatatatttagtaccaaaagagtatgcatttggccctagtttccctatcaacaaaatctaaagatgagcctaaacaattccatcctcagacagttgaaagaattttggggtcatactctgcattttaccaggttttggggaagacatctaaaaggaatttgacttttgtcctttaaaaatctctaaagcaagccagacatggtggctcatgcctgtaatcccagcactttggaaggccaaggccagaggcttgcttggggaagaccagcctgggcaacatggcaagacctcatctctacaaaaaaattttaaaagttagccaggcctagtagcacacatctgtagtcctagctactcaggagactgaggcaggaggatttcttgagtccaggagtttgaggctgcagttagccatgattgcatcaatgcactccagcctgagtgacagagtgagacccagtctcaaaataaataaataaaacaaaaaaactctaaaacaaattcctattatattacttatcatgttattttcattaatctgcacatagctccatcttctctactcagctacctattcctttaggtaaggggtgtgttcatctttttacccttgtttctaatacaatgatgggcatataacagtgcttaataaagttgttgatgtataagtacaataaatgtagaaaaaacagtggtcttgatgtataagaaaagattgtccatactttgagaggttatggtttaaattatagaagagaaaattcaaatgaagagaaattaagtggcatctaagaagtgaatttaaaatactttgtaaacatcctgggaacaattgcaaaagagcattgtgctgcatgagagaaaataggaactgtggacttcccttcatagttcttcatcatccagtatgccaacctgggctttttcacacagtaattttatggtcctaagagcagcaaaaggatcatcctcaatgtgcaaacacttttgaagtctctgcaatcatcatatttgctactgtcccatgagccaaaaaagtcatatagccaagctcagagtgagtttacgagcatactcgcaaaaggcctggatacaggaagacaaacacattgggaccctagctgcaatccatttatcatagaagggtaaggattcccaataatagcttctactaattccatatcctgtggttccagttgtacaaaaaataaaaccccgatataactgcatgcatacatgcacacacacacagacacatacacacagatctggaaaatatataaaaatgcattaataatgtttaatatatgcttctgtatttttaaaagattttaaatatgtttgttttcttgtattgcatatgtatcttgttattcagcaaaaacatctggaagataataaaatgtgattttggatgaggtttcaccttttgtgctttttatatttcttctgtgttttccatgttttctacaaagcatatgcactcttttataatcagtcaaatacgtgtgtgtgtgtgtgtgtgtgtgtcaactacactttaaaaatgatatggagttaggccactggagtacttctccatctggtttttctttactatgacaccaggaagaaacagctgaaaagttaagttgataacaaattctaaaaaaaatgtttttactccatctacaaactttgttttgaagtgtgcagctgtcactggttgcctgcttggtttcctttcagacgccctgctggcattgaagaggagtctgttttatttgtctggtcagaaggagcccttgaatttatggatgaaggagacaccctgaggcctttcacactctacgaatatcgggtcagagcctgtaactccaagggttcagtggagagtctgtggtcattaacacaaactctggaagctccacctcaagattttccagctccttgggctcaagccacgagtgctcattcagttctgttgaattggacaaagccagaatctcccaatggcattatctcccattaccgtgtggtctaccaggagagacccgacgatcctacatttaacagccctaccgtgcatgctttcacagtgaaggtaagaccctttagaaaagtaacagacatgcagattatctggtgaatacgttgaaattaattttcttgtccaacttctcatttttcttcacttagggcttaaatatatgaaaatctttcacttgtgaaaagttgcaatgtagtcacggggataagatactgaactgagtatgaggagtattggagaccagtttgtagaccacgactaattttgattacctcaaaaccaataaataaattttatttattcataaaattgcctgatttccattttccatatttactaagtgggaatattttttttttgagacaggctctcattctgtcacccaaactggagtggagtggcgtggtctcagctcaccacagcttctgcctcctaggtttaagcaattctcctgcctcagcctcctgagtagctgggattacaggtgcccaccactgcccaactaatttttgtatttttaatagagaggggttttcaccatgttggccaggctagtctcgaactcctgacctcaagtgatctgcctgcctcagcctcccaaagttctgggattacaggcgtaagccactgcgcctggcctaaatggaaataatttagtcttgatttccattttccatgtctactaaatgggaataatgtaatgctttcctccatacctcatagagatgaggttcagatgaaattagacagaatatttaattttctacttccccaacaagctagtataatatatagctatatatatatgtatatgtatatatgtatgtgtatacatgtttgtgtatatatgtatttgtatatatgtgtgtatgtatgtgtgtgtatatatgtatttatgtatatatttaaatatacacacacacacatacacaaagttgcatacactatggcttactggtgatttttttcagggatggcttcctctggcccatagaacgacttaattcagttcacctgagcacttagtagctcctgagtgctttctttatgtccagcataacctcatggtctatggaatatacagaaacaggatggtccttgtcacagggagtgttccgttttataatattgcagagatgagaattgcacataaggggaaaagaatgagaagcagttgagtacagcctataatgtccactacactgagacttagatcccgaactccactatctactagctttaaaccacagtacaagagagagtaacatcatataccaagtgttaggcaagaaatgctctgggagatcaactctcaaactgaagatgcttcatggataagattaaattttgtggtcttgggagtgaaatacaaatatgtgccaagaccttattaaatatggaaaaccctcaataagaacaaataaacagacaaactaaagcatttataaaaaaaccaaaaaactatgtttctatgctttaaatcctggaaggccaatttacatgaaggttatcttatggaggataacatttatcaaaatatttaaattacagtgagcaaatatattttcattaaactccagaagagcccttttaaattaatagtttaaagtacaatgttttcccactgtcctcatgtttaattttctcatatgactaaaaaataagcaatatgtaaatgaaaggataattgttttatcttcatttttatctgtttcagaattagtactatatttttattagatagtaaattatgtactagagtcttttatattatgtcttctagttcctatatgataagcattagaagcagtgttcttaagtgtaaaagatactttttagtggatatgtgatccaggaggaagttcgttacttcccaccatatccttcaaactcatgttctaaactttcacccttaaagtaaaacgtttatgagtatactgaaacacccttgttaatagctttctgaatgaggcaccttaatttaaatatgtttttattgaaggcatcaggattataatgattaaacctctgatcttttaaaatacaactttcaggggtaggagcctaataatcatttagtctcacgaaacagttctattggaattcccttgtggaataaccctgtaagtcatcccttcataaccagcttcattttaaaacacaagatttaaagtatatgatgaatccatgaactctgttctttatttaatcttctaggctctatttttatcacactaaaaagcttctgaaaagaggcaagtgtatggccccaagctttaagcggcacagggctctttgcacatgggccctccctgatgtggctttcattttgacagtccagtactggtgtgcttttctatttttccaaagattttttttcttgcaatgtcgaatagattagccagaataattttaaaaacaatacttctgtgtcctatttttgaatgtgtatgtgtgtattcaaagtggcctcccaaaacctaaatctttggctcttagaatttcaagagaaggcttcattagatacaccaagaaaggtcccacctgatcttttcaagcaaacaaggacatcttccacaaagcaatctaggcaagtgttcagaccttctggccactggaccacgttttcagggcatcagggcaactatgactctttatgatctgacacctttgaaggaagtcatcaggaaaatgaactagtgtttttgtgtttcacttattcccacagtccctgtgtaggagattgtgttcaatatttttgtttaaaagatatctaggccagacgcagtggctcatgcctgtgatcccagcactttgggaagctgaggcgggcagatcacaaggtcaggagttccagaccagcctggccaacatggtgaaaccttgtctgtactaaaaacactatttttagtatttttactatttgagaggctgaggcaggagaattgcttgaacccaggaggccacggttgcagtgagccaagatcatgccaccacactccaacctgggcaacagagcaagactccgtctcaaaaaaaagtaaaggaagttctattacttatccagggttctatactcctcaccgtcacagaagaatgtttcttttatctcagacaaatcctgcctcctataatttaagtctatctccctttgttcagagcagcatgacttctccataatagcacaaaggggcttcagggtccaacaaattattgacaattcaatctgatttggcaaataaccattgagtactatattcaatatgtcaatattgaataccaaacttaactatgttgttgaagtctactgtgagacttggcccttgagcagagcagagactgtgaggaagaatgagtgattcgttctgaggcacaggctattactgttgggcattttgggtttttaagcttcttgcagctgcgtttctgctgcccatgtttagaagaccccatttcatttttatttttgtataaacttaatgggtccaagtgaagttttgttacctggatatattgtgaagcagtgaaatctgggcttttagtgtaaccgtcgcacaaataatgtacatcgtacccatcaggtcatttctcatccctcaccctgctccctccctccctcccacccttccgagtctccagtgtctattattccacaccctatgtccacatgtatatattatgtagtcctacttataagtgagaacgtgcggtatttgactgtctgtgtctgagttacttcatgaggataatggcctctagttccatccatgttgctgcaaaagacatgatttcattcttttttatggctgagtagtattctacagtgtgtgtgtttgtgtgtgtgtgtgtgtgtgtgtgtgtgtttcacattctatatatatccatatatataattacattctatggtgtgtaaaattattcctatttagtaaatatggaaagtggaaatggaaatcaggagatatatagatatagatatagatgatatagatatagatatagatatagatatcacattctgtttatgcaatcatccattgatgaacacttaggttgattcaatatctttgctattgtgaatagtgccgtaatacacatacgaatgcaggtatcttttttaatataatgatttattttcctttgggtagatgcccagtagtgagactgctggattgaacggtaattctacttttagttctttgagaaatctctatattgttgtatattgagaaatctctataggggttgtagaagactccattttaaatcgcatcccaagtacttccctagatctacttactgtttatctaatttctgcaccaggtaaacaactttactgtcttctttcctttctgtgcctgctgtaggaaatttttcaagtttttgtttattggccactctggctaaaattcttcagggcaaaggaactacagaaccttctccattaatgaggcacagagtccatccccacaactgtaggattgcagttcagtccacaaactcgcaagaggtactgctaatgcattagtcccttgtttattaagatctcatctctgcccaaggggccatcaataaattgcccatgttgtggtgccatcactagcttgccccaaggtccccccagagttgtttatagacaggtggatgttgctgagagagccacataaaacaggtgcaatggaggcatgaattctgcttgtggtggcagtggatggagaactggcagtgggggccctccgtgggggtgagaagcgtatgtgttggcaggaacagcagcagcggcagcagcagcagaggcagcaggagcagagaaatggaaagagtgtgggttttaatgcatcactagctgctctcccaacctcatgaaaagtttcacctccctactcatctctatgtaggtctttctaaggaagaaagagggagatcaagattcttggggtctctttagaccaataccttccattattgaaaacagctttaattagaaggccttaaactcccttcccaattagctctgtgatgaattgtgcggtgtcaggaaagaaactgtatttagccttgcttggcatgcaggagttccatggtggtatttacagggaacactcctggcaaggttggcgatattgctaccaccatttgggtttgtttgctttttctcactggcatctgccattgtgctggcagaaataaatctgataatttgggattttaaagaaaaaggtggtttacctattatctgtgccctaactatatccttgcttgttccacggggttataaaacgtcaagcccagatcatgcatttgcccagtatcctaaaagataaatggtacttcactctgtgtagaatcaagcataaggtgctgagaaataagcaaattatatgggtcactaaaaattggcttccaatctgggaataaaatccagaattactaactctagtttctagattctagttgccaggcttcctttcccaatgtcaaggaggaggtagtcaaaatttcctcaagggtttgtttcctatatctttaccattaagtagatatgtggcaaaaataataacaataataataaaatagatatttcacaattgccatgttatgaagagtgtgtgagtaaattgataaatttatttttaatcccattttcattttggcttagataacataaaatattactgctctttacatatgatcttaaattagtttcaactctttttaatttgatgattcttagccttttctccccagacacatttattagacaacagaaatactctgggagatgtagctttctaaaaggactcctttggtgactatctttctaatgtgaagaaaaattcagtaataaaaataattatcatatttcctgggtcggttctataaactgagattttcacattttataataagaaataactgtgtcattcttctatataaaagatagaaaacatgggtgagtaaatatcacacaaaacaatgaatatttgtcggcctaaccctttttttttttttttttaaagagacagggtcttgctctgtcacacaggctgcagtgcagtggcaccatcatagctcactgcagccttgatgtcctgcactgaagtgatcctccctcctcagcctcccaagtagctgggactataggtgcatgccaccatgcccagctaattttttaaattttttgtagagattgtgtctcactaaattgccccagctggtctcaaattcccggcctcaagagatcctcccgctgcggcgtcccaaagtgttggaattacaggcttgagccactgaccatggcaaaactttttagttgtgatgatattttagctttaatatcaacttttcatttacttgccttacataatctttaacccttttgtctaatttgggctagacaaattagactttcagacaaatatgtatttgtctgaaagtcataaatacatataaagaatctaccttttgctcaacattattggggatgaaaaccatgtaagtcttttgaaatttatgtaattacatctttgaaagagccatatttttctccaaccactttatcccagcaagctccatcaggattcccttgctcacccatcagtaacatctaaggcaggtcccatgattttccagtcacttttcagtggcaaggatcaacgcaactggtgattaagactcattccaagtgttttttaaaaacttcagtctagactgggggcgatggctcatgcctgtaatctcagcactttgggaggccgaggtgggtggattacctgaggtcaggcgttcgagaccagcctggccaacgtggtgaaatcctgtctctagtaaaaatacaaaaattagccaagcatggtggctggtgcctgtaattccagccactctggaggctgaggcaggggaatttcttggacccgggaggtggaggctgcagagagccgagattgcaccattgcattccagcctgggtgacagggcaagaacctgtctcaaaaaacaacaacaacaacaacaaaaactccagtctaaattaaaacctgatatgtgcttaaggatctgcagtggggaaagagggcatggtcattttcctctttcttcagttccctcttctcttatttatttccccaggatcatggcatgaaaagaaagaattagacaaaaaggaacagagctttactcaataatattgctctaattaatcttctattaattttgagggggcagatgcctcatgggattttctctgtgggttatataggggtccccataggaaattccatgcctcatagtcctctgatgcaggcaatacactctctggctaatttcttactatttgttattgtccaagaggtccaccctacaacctttttttgcctctgggggcccttctcccaagcaggcagccaatatcaagtcctatcacgttgacaaaactcattcctttcttggcacccactaggattgcagaaaactttggtttcaccaaataatgaaggtacagcttgtccagtactatattctctgcttgacctatcatgctggatgaaacctagccagtctcctaactttggaattcattgactaagacacaggtattagcttctgtgctagcctattatcccaaaactatgggatcacttaaggatttcagaagacccttttgactctagtcattgcatcaaaattgtcctatgaatttcatcagtgcagtaggaagcctcttgccaagaccagactgttcatctcacttttctggcaacactcccaatttcttcaagagcttctcttggatattccttgcatgccttgaaaggggagtgtggagaaatcccattccctccctgaagtgggaaagatataaccaaagcctctttcttctccactgaatccccttctttaattttttttatgaacttggatcttctcatataggttgtctacatagatcttcataggaagatggatcttgaagtctgttttttccataagtcatgcagtgatatgtctagctgttccagtagagttacttaccacctatttttctaaatcatactcattattctccaatacagttctgtttcacatcctattatataactaaatggccctatcatctttctagttgcacaagccagatcatttttgagtcctctctcttccttacttccatatcaattcttcactaagtgctattgattctatttccaaaccatatcttaaatccttccacttgaagacaacattaggatcttcacacatgttaatccctcctcctggaatgatggctcattctcctataattcatctgtcctcattcttactcatcaagtctgaactaaaatgttgcttatctcatagggctgctgcaatgactaataaattaatgtatatgcaaagtactgtaaagggcaatataaatagactataaacctttagcagtccttctttttgaaaaaacagagactggaataaattagcaaatgtagataaggttctggtttgtctaggcaactgtactaatttggtcatgagtgaaaaaccttatgttttatacattttaagtgttcctcaccttgcaataaaattctgagcttgcaaatttacatgtttcctgataccacattgttaatttccctgtaattttccaaatactggattaggttctatttcctttctaaactgcctgaagcaagaacatgctttttttttttttttttttttgtctcctgaggtttattacggtcttatccctggcccccctgccccaacaacatcacatacctgccagtctaagagccctcctcaggagatttccaccctatatgtagttctctttacctgacatgacactcttaggaccctaccctttcccttagatctgggattatatcagcagaacatgatgaggtattttagtcacacacacacacagacacacactctcacacttctcaaatcatacaaatggattctgccaaattggcatctacctacttcccctatgccaaatagtagtttatcagtacatgagggacagttagttggtggggagactgtttgacctgtgagtcaagtatgttgctattttctggcctttaaccaacttacaaggaaaccctctttagacacctaagactcccgtggagccttgtcaaaaatgtctgtgaaagtaaaatgaactagtccacatactaacaggcccaggccataaattcagaatatatgccatttagcagagacagcaagctgtaaatggcagtgaagggcagaagttaattgaactactctgctcttgtcacagatggaaagtagccactacctgagacaagatggctgccccgaagtaccctattacagccaagagatcatatccttagctctgcaagggcttatgggtgagggggaaatcatacacagatgaccaatttttttatggttcacagccgataaaagtgaaattcagcagctgttcaggacaagtgaccactgtaacagctgtaatataacctactaaatagagagggaattgcattagagcaagaggttagctgtgatcatcggcaggtgagtgctttattgaagttgaaagaccattaacattgatagagtaattatttcaacttgaaagtaattaccttgatgggtgataacttctctagtgttcccagatttgattgggccaaacaattgtgagctcctgaagcctagaaaaatattacaacaatactgtgatttttaaattactgaaaccactgttggaatattctaattatgccgaacagtgaaaagattttgccttacacaagctagtgacctctcatgtagagagagacatttgctttttaatccaaatgcaatgacccacacccaccacctgtgaatacatatgtgatgggtttgcaaatgaatctttttatctcaatataatttttaaggtgaaacatcttgttagtgctgtgcctgggtaatagtaagctagaactgctgacatttttgatcatatctatggacttgaagtctccagaatggcaactatcttctatctttgtcacagagggtttaaatttgtataaattaaatattttgataatgactacacataaattagaatttctggatgccacgtactttggatcccaaatttcagatattatctagttacataatcagttgtttaaataactttctcgcctgatgttatgcaactccactacaaacactccattgtcagggtattttccgtttacctacactggacatcagcaaacaaaattaaagttgaaaacctgggctattgcttctctgtagtctcatgaatatatgaaaattgcaagttatttgcaattgagggccaagacacatcaaatctaattcagtgatcaagaccaagaaatacagggctcttccattaatcagtttttcaccatatttctcttttgagaatctacttggtccagaagctataacagatacaaacaaacgagaaatagtcttttctctctgaaactcgtcgtgtatttggagaaacaataagaaaagagacaaaatacaatgtaataagcaatcattttgtcatgcatggtattgattgtacttataaatagttacaagaacctaggaagactctagcccatactcctgaatccaaacccagcactcattctatggaaccacaaaccattgacagaaaaaacacaggcatcatgattcttagtcatgttgtcagaaaagatgaatgtgacatcaccttaaagttcctggatgattccgtagacctttctatcatcttggcagggtttgatcagatgatcagccaatgaatgactatctttttggcggcacttcccaggagttttttctaatcaaaatctcagactctcctagggacaaaacaggtttctacttgttgtctaagagccaataaggaatgttttaccaagcagttaatgggtttctttcatctctccatctcggctctgaattcccctccatagacaaagtctttgggtctctgtttcagaaattaccgtagggtagaaatctctgccaagccagaagacatttgcccactggaaagtaatgtaactggcttgaatttggtaaaagagtgaaggtttgagacaaaaacataccacttgggaaagtgataaaaatttatgaattgaattgtaaatcttgccattaagccaaccaaagagtaacaaaatctgaccaatctgacagcacatcagagttcttagcacagcaggctcaccatgtgtcatatacagccaggctaaagattgtattaaggacccccttaggtactctgaatttaaaataagtgtaataactcatttttaaacattttatatgatacttgaattattaaatattcacattacaaaatcagagaattttaatccattcaaaagggtgggttgtctaacactgaaagataatggtcatgtctagatagtaaaattacagtatatttttaacggatgtacatgttactttttgacaagacacaagtagtgaattttatcgtacaaattcctattgggtgattatgatacagagttttatttttgctaaagcaattactaatgtcatggctggatacctgtgcccattagtggctggttctgtgtttttttaggatggttattgatctcttgctgagctgagattcaggttttatgccagatagcttgattaatgggttggtttctataagtggactgaatggggatagaaagcaggggcagcctgctctgccaaccccaaatccgtcaagacgcatagctcattatgaaacagttatcaaggatacatgaaaaattaattgggctcagtttgattctgaaaagaatcggctttctacttggcgggcccccccgccccccttccactctttccagatgttctgcaccagcccctagagaaacagcaaagggagacgtattaatacattgtattgattagatcaagacccctgacagttatttgtagagataccatctggctgctgttcgaattccttcaccaaaaacaggacgtgacatgttattaatctcaactctctaagtatagacagttgccttttctgctaaaccgcattttaccattccgtaggagatggaggaagacctgaagggtgcagaaattaaggttattacacaaattgagccatatggtccaaatatttcagcaagaaaattgccaggcaataaaaattgctcctgccttcctaatggtgtaaattacagtttaaccatggctctaatgatgtccttctgccgcgcttaactactgttacatgaaggacattgttttaaaaatataaaaaacaagtaaatgccagcagcgtgttttacaatctgttagtgtgtcattaagaacactgtcagaattacataaacataatggcaggcaacccagcatacaaaggaactcgtatggaaatagaaagtgtcttgaaaactctcttcattatctctgaaatgtcaagagcactgtcccctctggaagttttctagggagaaaagacctgtccatctagtgctttattctaattctcatgtgtgtcccaacagcagtgttttctaaatcaagtgtcacaacccatagtgagactaagtacacatctggtaccacaaccctgtccatatacaaaaaatgaagcagacaaggtgaggagacagctaatgaattctaaacaaaatgatagacgttgaccttttgaagtatttttgtttttggggaaaacagttaagactccactatcttccttgatgatgacatcaacaattaaaagtataatttctatcctcagcaaactaacctggcaacagaaaaccaaataccacatgttctcacttgtaagtgggagctgaacaatgagaacacatggacacagggaggggaacaacccacactggggcctattaggggggtgaggggaggaagagcatcaggataagtagctaatgcatgtggggcttaatacctaggtgatgggttaataggtgcagcaaaccaccatggcacacgtttacctatgtaacaaacctgcacatcctgcacgtgtatcccggaactttaaattaaattttaaaagtataatttctgtcatccctatttggggcatgatattaagaggaagcttacttaagataatcaaaaatctttgggaattacaataaagaccattaatatttgagtaagacttgaacccttcaaatatttttagacctattacaccaaaaacacctcggcacttaaaaattccatataggtcatattgatgttttattctctaaaactgcacaatcctccaagctttttggtcttctaagatgttataaacacagtttgttaaaggaaaagtccagataaacgtttgtagaaaaatttgaagggaaaactacttttaattcccagaggagagttgccttatctttaagccctttttccttctccatttccccaaagggagaaagaccaggatataaattgccctttaaactaaaaaagaaaaaagagagggaaaaaacctaggaaaccaaaaaattattctttttgcatgcatgcattaatattaatgagaacccattaagttattatttcctcatggcacaaatggcaaggctagcaatctattgactagagcatcttctgcctggaaagctcttacccaggtgtccccatggttggctcccacactttcttctggtcttaagtgaaaagttactaccactaaagccttacctggcctactcagctacaatttcactccactctccctcacacacactttctattcctcttctgtctttatttttctctttaatatttagcttttatttctggtttcttgctaacctgtaatcatatttcagaaattgtttttcaaatgctttgttatgcttcttatttcacctaaaaggaaatctgtatgttcacagctaaatcaaactgagaaagcatcatttatatgttccaatttcaatttataagctgacaacttccacataaaacatattatgggcactttacacatgccatcttatttcacctcaataaccaatctgtggagtattattacctaaatttattaatgaggaaatggaaactcagagaggttaagtagcatacccaaggtcacacagctagctgcagagtttggatttgattgcagctctctcagcttctaaagccttttctttctgttatccagtattgcttcttgagtttcagcctagtggaacaagatgttatttatgaaaagctaaacatcaatgaaagccacaaattatagttcaataggacaaagagatgacacagagcttgatatgattcattgcctagtataaatatagaaaacaattgataaaagtttcaaagaattaaaagatcacttggactggaaaagttcagagaaggcttttgggagaggtctgtgctttgaacaatgggtgaaattcaaatagaagaaaagtagaacagatattaccttattcaggcaaagaaacagaagcctggttttgaaacatctgatggcaagtctctgcttcaggaggtcacatggggaatatttttccaatatgcccccattaattgggctgatattaaaacaactgatttaaaaaaaaaatcaaaatactcccaagagatgcctagcaaagctattgagtgaggtggttagcagcatgggtctggggtcaggaaacatagattagagactggctttggcttttttactcattgtatgccttcaggaggttatgcctaatagtgcctcccgcagagaggcagcacctcttagagtcgcaggaactgagacggcactcagtaaatagtggtgagtaagattcaaaataggttttcagagaagaaatcagcacatgaagatatcatggtgtcatagtgtgttgacagggtcctgtctggagatactagtccagaatttcaaaaaaaggaaaagttttcttctggccgggcgctgtggctcatgcctgtaatcccagcactttgggaagccgaggtgggcagatcacctgaggtcgggagtttgagatcagcctggccaacatggcaaaaccccatctctactaaaaatacacaaattagccgggcatggtggtgggcacctgtaatcccagcaacttgggaggctgaggcagggagaattgcttgaacccaggaggtggaggttgcagtgagccgagatctgccactgcactccagcctgggtgacagagcaagactccaaaaaaaaataaaagaaagaacaaaagaaaagaaagacaggaaggaaggaaggaaaatttattatattttcttgtttcccctgcattccctaatacccctttcccaaaagtatggatttcttcactaaatatgttagtagcagaatggtcttgtggcagttgacccaagactccaggtagagcagtggggaaagaaaagacaaggccagccaagaggccagccaagaggacaagctcctccaaaggttgacttgagatattaaactcattgaaaaagttactcaacatccacagtgttctggtggtacctcacttagtcctggacaatgaatcacagcccaagcttcatcattgaattggtgacactgccgagggccaactcaccagccttcaaaaacgacagtgctgctgacagcaaaggcgatgaggacacacatgtgcatccacccttgagatgctaaaagaggcaggaaagaacttgagggaaagaacaaatcactcttctgagattgtcctataaactttataccaggacctatgctatcatcctccttacctaatcatgtttaatatctgatttataagaatctaaatgtgtacctaaaagtagctttctaaatattactgggccacattaaactgtgaccaattttcttccttcctggcctaccacattttagaaatatgatagcatatttgggttgggagtcgctaaaggcctcaagagagtccatctctttgtcctttctgactaggaagacctggtcatcacgccacaagccttggtgtctcgtttttaacagagcaataattatttattagtggaatatatgcttattatatccagaaattaaagttgttaggggacatttgtgtatccaggtccctgtggctgggtgatcgcatctgttagaaataaatcactttaagaaaattatattagccccacagacagtcaagaatggagcaaagggagggaagtgtgaatagggtgaggaagcttgattttaaatcttgtgaaatagagtgtggtcaatatgttgtcagcacattacagtgtgcagacatcaactccatttttcccctctttgaacctcaggtggccaattaacagtatatgctatttattcattacaaaacaggcaggacaaattgaatggttagaatgactaataagaattcttagcaaggagtaaaataaaaaatgatacataaggagagaccccccagaaaaactttagggatttccagaaaaaaaagtcttgaggagttttcctgttaaatgtatctagaatttctactgacatgaggaaattaaaatggaaagattctctttgaatacattttcttcctaaaatatgttctcttcaattccctcatttgtatttccttagagtttcattccttcctaaagcagaaagacagttttaaattacttctagcaattataagtatcattagggtgttttgatgctgcatttttacaacaagcactgtgcttgccttccttatttgtctctcagttcaactccaagtcgcaacacaggaaatgaaaaccttgtaaattgacttgatcttatgaatactcacttttgcaaatatgaaagaacttaagaagggattataaaatactccttatctatataattaaaattcagttgaaatatatgaattcaatattttaattcatgcatttcattttgcgggcattcaaagattatatgcttctatatgtctgccattgatttctgtaaataacattatctctcttattgcaaaacgtacatcagaagaagttggaagaaagcgagggcttgagggatgttaaactgaagcagcagtgacttactatgcagtgttagtagattgcttgccttgaggatctagaagccgatagaagaaatggagccagcaaataagaaatttcttatttcttattccagaaataagaaattctgaacttttaccttcaaagatccaaaaagaacatgctaatgttcttttttttctaacttttgagtaatttagtcattctcgttcagaaaattaagggtctacatctggcagcaactgaaataaatggctcaattgagtacacacttgaatgtcaaatatatcactttaaaagtcaatatttgtttcagctgtaaatgtttctgaacggaaatgatgcttttagtgtctgtagtctaaggagtagttttatttttgaaccctcaaattgagtgctccacctagagccgtaggaccctttcctttccatgaggagagcgccctctactgggtatgtttacttaccacgcatgactgttaagaccctgagctaaacgtatgagcagttgagatgtacataagaaagagtttttggaaaatctttgcccctgcttgtactagaatgattgcaagtgtggaagtagccatagttcactgtagttttctttttactgctgtattattgcaccctgttgggggatacatctgagcatttcatgtgtcctacttttaaaatgcccagatggtggctacgtgctttggtttgaattgggcagccctcatctttcatgctctgtagtctgcctcgttatcagagagacatgagacaaggaaaattcttccatttttcagctcctcttcatctgtttctagtcacccacagtgaatgatgcacttgcacaattgttaaaatgacagtcactgtgataactgaacatcacttccctgggatggggagttccctatgtacccatagcttcttgattccttcccaatacagcacctttttcagtgtaactgatcacttgcaatcttgtaagtaacacagcagtgagaggcagtgtaaatattttataccttgccccaatcacttgtatgtgcatcggtcttcttcactctagcctttaagcttaacagagattttaaatcaaatcattcaaccctagaaatagtcaaaagaattaataaaataaatgaaacagtgtaactggttaaaatagccccagtgcacaatacaggtttagtatgattttgtgacatacacattttatagggcttttgtctccaactacattcttcaaagagccatctgggcaatgaccataggtatcatttttaccaataatagtcagcacttcccactgggaaattagtcaagggaatgagtttttttttttttttttttttttttacaaattatcttcaagcatctatcttccaaaaagtattactggactttgtccattacaaggcaacaacctaagtgagttacttgtgctcttattttagaactttattcatcagatcattgtgatcaaactcaatttcattttcaaagaggaaaaagattttgctctgtttttcttcttaataataggtttgctgaaggaagaacattaatacaggtcagcgatctccaaactttttagaatattcacttgtagaaataataatttggggagcacacatctgcataatatgtatatttacttatttgtaaattataaaatatgtactagttaaatagtatcatttacactatagaaatagacatttttaaaggagtggaaatagataaaattatcaagaaaatattttattatgagcaactactatcaataatacctcaaggcacaatacacactgaaagattaatcattaatgatgctgaatgtcaatctctttcctgagtgttcttgatcatttcaaaattttgttgacacttctgatcaaatacaattggaccattcatgtttatacctcatgctgtggttgataaggagcttgaaggaaggagaatcagactggccatttatttgttcttcatttatgtttgtattgttagtgttatatttgaatcataaatttgaattctaggaattttgaaagccattcatgtttccaaagttagtatacttaaaaccagataatataatccataaacccccttagcatagaaccataaactacaatatgtcacttgacacaaggggtccagaaccccggggacgcagaccagtactggtctgtggcctgttgggaaccaagccacacagcaggaggtaagtggagggtgagcctcaccacctgagctccacctcttgctgtgctccacctgaggagtggagcacagatctgctccacagatcagctgtggcaattgcttctcacatagcaaaccctattatgaactgcgcacgcaagggatctaagttgtgtgctccttatgagaatctaactaatacctgatgatctgaggtggaacagtttcatcctaaaaccatccccacctcccccttccatggaaaaattgtcttccatgaaacggatccctggtgcccaaaaggttggggatcactgctttgcactaaaagcaaacaaatagatgaatattgttagctcctcgctgtaaaactcccattcttccttttccaaggacagatacagaacttaattgattcattcattcactcatccagtcagtatgtgtatgcatctaatatatgccaactgggtatatgacagtgaataaaccagacaaaaatgcttccctcttgaagctcttactctagtggggagataaagacaataaacaagataaggaaataaaatatatacataccatacataagctaagggcaatggaggaaaataaagcagattccagagtctccattataaaaaatacaacttttgcaaattggtctttagttcttattgagtttaaaaggatgtttcccttccacatccttcttcccactgtcttctgggatttttgcttcagatatgatggtcaaattgcttattataaattcccttctaagattctatgagttttaaatttgttttaattgttcacatgttgcattgaatgatgcaattgtactcttctagcacacagagctagtaaatttcctatatattgatatttaaagcctgtccttttatggagtattttgtgaccacctaaacccatgatgatttcttgtgtatacaccttcagtgcttggttcccatgtatttctctagtggtttcagaaaggtgagttttacattcctaatggattacagttcctaaaatccagtatgttcatactttctacttttattcctttccatttagtgcctagaaccatgccagaaaaagacataatttgactgtggatttaaccctcagatcacaaaccaatctcagagctttatttttttgctgagagttttaaataaactataaagtcaaatttaaacaattatcctttggaatcaacagaaccccacatttccttagctttccttagctgttcctattcccaaggatcacattcagagcactcttcttgagtgacagtgatgtgccaggtacttcacagaggtcatctgttttaattgtcacaaaagcccaagagaaagatactaactgttagaaatctagctcagaaaaagtagatgatttacctaaggtacatctagtgtgagtgacaatcagaacttaaactcaattcttctaagttgactgctgttttgattaaagcgcctgggctctcagaagtggactcttcctgggtgttagtcacaagggcttctcagaatttttctcctacatatgagacagcagatcatttctgcctctctgctaagataagccaagcaaaataatagattgtagaacaattaataatgcattcaaaatgccaaactcagcacactttctatcctttgtgaaaaattttgttcccattttgtccaaatgtctaataaaaatgattgtggaaaaataaaaacaatctttgatctgcctaaatgaaaataagaaccacaacttctagctctcagaacaaatcaaagttgtttttatttttaattaagtatgctaagcttaagtacattttctcttaaggtgtaattactaaaccatgatgatttctttttgtttattcatttaaaacacaaataaaagcagataatcaatagatcataatctaaaactagaggatttacaagttaataagcttgagtcaatagatattccataacaaagctttcaatgctgaacctgacataatttgctttgcactaagctggttgacttaatgctttaatttaattccaatattaactgaaaaatccaaagaaaaggggaaaatttaaatcctattatactgaaatatgttcaaagcaacaactcaatatcctgccacaactgcttaagtgtgccaccaaatgtctgcttaatcacctggtttctgattggtgataaccagttaacccgtttggagcctggtacaagtgaattgtggaagtttctcagtggtccattcatgcaatagcttttatcttagcctcaacagtcatcatattttcatctcataatgtctacttttcctgacttatggccaaattattggagttgtttttatttgaaaagcaatttctccttgtctcttgagattaccatccagcctgacctcccaaaaagcagaacagtaggcaggcctaggtcaaagaacagaagaaagcctttcttagttccctgaaaggaagatgtaagaagctatctgtatgaagaaatagcattagatggcatccatcatgcaaagtctggtagtactagtagaggtagtgagagggatgtgaggcaatatccagcataccttcaaggttatgagcacagactcaaaagacaggatccccccaggcaaatcctggttcttccccttacaattatatgaccatggacaatgtgcttcgactctcttttcatccatttccttatctgaaaaatgagggtcataatagtgtctatctcataaggttgttttaaggcttacacaatttaatatacataaagtacttgaaaagcactcattgttatcatcctttgagatactcttgaggcataaggaacttatgctaagaataattttgagaacagcagcatcagtcactgaatatagtagtcagatgtgtctttcagaagagttatgtgtgcacggccaaagtcctaaatattccatttgttaccatccttaaaatatcatttgtgaatttgtaactggtttttgctttgtgtcattgctggtcgactgcagtcagggtggcagtgttttggctgccccctaccatctttagttttctggtcccattagtgttgtgaccaagaacaagttagtgccctttgctcaagtaaatgggctagaagttaagcactgaccttttaccataggggacccttttctattctgaaagagaacttagaaaacagaacagaaatctcattgatttttacaatgcacattttttcatatttctccgtctctgaaattgcatgcatctaacaatcttataatcactgtagatggcagttgttacatacttgtcatttcctgtgcctgcacaaactctcgtcacttcacttgagttctgtgcaccgttggtacgacacacacattgagtttaattgccacttaaaatggcttcaaaaaatcatactatgatttggcattaaaataaaaagtatacacaaaaggcacagaaacagtcacttcatataaaacttaaaaagaaaaaacaaactatgcccatgcaagtctaaagaagtctttcaataagtataaaatacacatctaagtgataaaggaatcactgtgttcttgttgaattagcagcatatttttctctttcttagggatacataaaatagtttttaaaaaaataacagtgtgtttaaatagatgaaatcctggaccccaaaaataggtgtgttttataataaatatttttaaaacagctagcatattgccaataagataatgtatttaaataaaagataatttattcattccgcagacatctatagagcacccatatggtgccaaacatattttgtatccctagtccctgtcctctaagagttcaaggtctagtggggagaaaaggcaggtaaatagatcaatctaatataaaaatgccataaacagcagaaagaacagagaagagagacaagtaactcagtctggggagtcaagacactcttccaaatggagatgacattaaatttgtattttcaaggatggaaatacatcctttccaggcatagaagggcattctaagaaaagaggaaatcatgaacaaaagcgcagcctcattgaagagtgtgttgtaactgggtctgagtcatgagtctagggacagggtgtgaatgaaagaggcagaccagggagaggctaaggatgtgcccaaagagacaggctgcaggagattttgctggtaagggctggcaatcaaaaccaccctgcttcctaaccaggtctaggctctggcatcactctgacttttaaattaggaaagttagagcttgattcttgcacttgactctgtcaatgcattaggatctaggagagatggtaagtgatgttggaaagcagtccaaagttcataagcagttagctatttccatccaaggatgccatgatttcctctcctgaaactaagtgaacagccatgggtaaaaatgaactgaaggcagaacatgggcctctcatgtaaaagcagaagtaggggattcccaggcaagatggccaaatagaaacagctccagtctgcagctcccagtgagaccaacacagaaggtgggtgatttctgcatttccaactgagatacccggttcatcccactgggactggttggacagtgggtgcagcccatggaaggcgcagaagcagggtggggcgtcgcctcacccgggaagtgcaaggggtcggggaactccctcccctagccaaaggaagccttgagggactgtgccatgaacgactgtgctatctggcccagatactacacttttcctacagtcgtcacaacccacagaccaggagattccctcaggtgcctacaccaccagggccctgggtttcaagcacaaaaccaggcagctgtttgggcagacactgaggtagctgcaggagtttttttttccataccccagtggcacctggaaccccagcaagacagaactgtccactcccctgaaaagggggctgaagccagggagccgtgtggtcttgctcagtggatcccacccccatggagcccagcaagctaagacctactggcttgacattcttgctgccagtacagcagtctgaagtcaacctaggatgcttgaccttggttcggggagggatgtccaccattatggaggcttgagtaggtggttttcccctcacagtgtgaacaaagccaccaggaagtttggactgggcagatcccaccacagcaccgcaaagccgctgtagccagactgcctctctagatttctcctctctaggcagggcatctctgaaagaaaggcagcagccccagtcaggaacttagagaaaaactcccatctccctgggacagagcacctgagggaagggctggctgtgggtgcaacttcagcagacttaaacgttcctgcctgctggctctgaagagagcagcagatttcctagcacagcacttgagctccgctaagggacagactgcctcctcaagtgcgtccctgacccctgtgtcttctgaaagggagacccatcccagaaggagttcatagacatctcatacaggagagctccagctggcatccggcaggtgcccctctgggacaaagcttccagaggaaggagcaggcagcagtctttgatgttctgcagcctccactggtgatacccaggcaaacagggtctggagtggacctccagcaaactccagcagacctgcagaaaagcgccctgactgttaaaaggaaaactaacaaacagaaagcaatagcatcaacatcaacacaaaggaagacaatgaaacaaccccatccgaaggtcaccaatatcaaagataaaggtagataaatccatgaagatgagagtaaaccagcgcaaaaaggctgaaaattccaaaaactggaatgccttatctccaaaggatcacaactcctcgccagcaagggaacaaaactggacggagaatgacttcgacaaactgacagaaataggcttcagaagcaaggtaataacaaactcctccgagcaaaaggagcatgttctaacccaatgcaaggaagctaagaaccttgaaaaaaaaggttacaggaactgctaactagaataaccagtttagagaagaacataaatgatggagcagaaaaacacagcactagaactttgtgaagcatacacaagtatcaatagccaaatcaatcaagcagaagaaaggatatcagagattgaagatcaacttaatggaccagtgcaagaagattagagaaaaaagaatgaaaaggaacaaacaaaggctccaagaaatatggggctatgtgaaaagatcaaacctacatttaattggtgtacctgaaaatggcaaggagaatggaaccaagttggaaaacacacttcaggatattatcaaggagaacttccccaatctagcaagacaggccaacattcaaagtcaggaaatacagagaacactacaaagatactcctcaagaagagcaaccccaagacacgtaatcatcagattcaccaaagttgaaatgatgaaaaaaatgttaagggcagccagagacaaaggtcgggttacctacaaagggaagcccatcagactaacagtggatctgtctgcagaaaacctacaaaccagaagagagtgggggccaatattcaacattcttaacgcaaagaattttcaacccagaatttcatatccagccaaactaagcttcaaaagtgaaggagaaatgaaatattttacagataagcaaatgctgagagattttgtcacaccaccaggcctgcattacaagagcttctgaaggaagcactgagtatggaaaggaaaaacttctaccagccactgcagaaacataccaaaatgtaaagacgatcaacactatcaagaaactgtatcaactagtgggtaaaataaccagctagcatcataatgacagaatcaaattcacacataacaatattaaccttaaatgtaaatgggctaaatgccccaataaaagacacagactggcaaattggataaagagacaagacccatcagtgtgctgtattcaggagaccaacctcacgtgcaaagacacacataggctcaaaacgaagggatggaggaatatttaccaagcaaatggaaagcaaaaaaagcaggggttgcaatcctagtctttgataaaacagactttaaaccaacaaagatcaaaaaagacatagaagggaattacatagtggtaaagggatcaatggaacaagaagagctaactatcctaaatctatatgcacccaatacaggagcacccagattcataaagcaagttcttagagacctgcaaagagacttaaactcccacagaataatagtgagagactttaacaccccactgtcaatattagacagatcaacgagacagaaaattaacatggatattcaggacttgaactcagctctagcagatctaatagacatctaacagacctaatagacatctacagaattctccaccccaaatcaacagaatatactttcttctcagcaccacatcacacttattctaaaactgaccacataattggaagtaaaacactcctcagcaaatgcaaaagaatggaaatcataacagtctctcagaacacagtgcaatcaaattagaactcaggcttaagaaactcactcaaaaccacacaactacatggaaattgaacaacctgctcctgaatgactactgggtgtagaatgaaattaaagcaaaaatacatacgttcattgaaaccaatgagaacaaagatacaacataccagaatctctgggacacagctaaagcagtgtttagagggaaatttatagcaataagtgcccacaagagaaagcaggaaagatctaaaatcaacaccctaacatcacaattaaaagaactagagaagcaagagcaaacaagttcaaaagctaccagaagacaagaaataattaagacgagagcagaactgaagaagatagagacatgaaaaacccttcaaaaaatcgataaatccaggagctggatttttgaaaagattaacaaaataaatagactgctagctagactaataaagaagaaaagagagaagaatcaaatagacacagtgaataatgacaaagggaatatcgctactgatcccacagaaatacaaactaccatcagaggatactataaacacctttacataaataaactagaaaatctagaagaaatggataaattcctggacacatacaccctcccaagactaaaccaggaagaagttgaatctctgaatagaccaataacaagttctgaaattgaggcagtaattaatagactaccaaccaaaaaaagcccaggaccagaaggattcacagccgaattctaccagaggtacaaagaggagctggtacaatttcttctaaaactgttccaaacaatagaaaaagaagaactcctccctaactcattttataaggccagcatcatcctgataccaaaacctggcagagacacgacaaaaaaagaaaatttcacaccaatatccatgatgaacattgatacagatattctcaataaaatactggcaaatcaaatccagcaacacattataaagcttatccaccacgatcgggtcagcttcatccctgggatgcaaggctggttcaatatacctaagtcaataaacataatctatcacaaaaacagaaacaatgacaaaaaccacatgattatctcaatagatgcagaaaaggccttcaataaaattcagcaccccttcatgctaaaaccactcaataaattaggcattgatggaatgtatctcaaaataataagagctatttatgacaaacccacagccaatatcatactgaatgggcaaaagctggaagcattcccttggaaaaccagcacaggacaaggatgccctctctcaccatttctattcaacatggcattgaaacttctggccagggcaatcaggcaagataaagaaataaagcatattcaaataggaagagaggaagtcaaattatctctgtttgcagatgacatgattgtacatttagaaaaccccatcatcttagcccaaaaatgccttaagctgataagcaaattctcaggatacaaaatcaatgtgcaaaaatcacaagcattcctatacaccaataatagaaagagagccaaatcatgagtgaacttccattcacaattgctacaaagaaaacaaaatacctaggaatacaacttacaagggttgtgaaggacctccccaaggagaactacaaaccactgcacaaggaagttaagagaggacacaaacaaatggaaaaatattccatgctcatggataggaagaatcaatatcctgaaaatggccatactgcccaaagtaatttatagattcaatgctaccccatcaagctaccattgactttcttcatgaaattagtaaaaattactttaaatttcatatggaaccaaaaaagagcccatataaccaagacaatcttaagcaaaaagaacaaagctggaggcatcatgctacctaacttcaaactatactacaaggctacagtaaccaaaacagcatagcactggtaccaaaacagatatatagaccaatgaaacagaacagaggcctcagaagtaacaacatacatctacaaccatctgatctttgacaaacctgacaaaaacaagcaatggggaaaggattccctatttaataaacagtgttgggaaaactggctacctatatgcagaaaactgaaactggacccctttcttagaccttatacaaaaattaagatggattaaagatttaaacataagacctaaaaccataaaaaccctagaagaaaacctaggcaataccattcaggacataggcatgggcaaagaccttatgactaaaacaccaaaagcaatggcaacaaaagctaatattgacaaatgggatctgattaaactaaagagcttctgcacagcaaaagaaactatcatcagagtgaaaaggcaatctacagaatgggagaaaatttttgcaacctatccatctgacaaagggctaatatccagaatctacaaggaacttaaacaaatttacaagaaaaaaacaaataacctcatcaaaaagtgggcaaaggatatgaacagacacttttcaaaagaagacatttatgcagccaacaaacatatgaaaaaagcctcatatcactggtaattagagaaatgcaaatcaaaaccacaatgagataccatctcacaccacttggaatggtgataattaaaaagtcaagaaacaacagatgctggagaggatgtgaagaaattggaacacttttacactgttggtgggagtgtaaattagtttaaccattgtggaagacagtgtggtgattcctcaaggatctagacccagaaataccatttgacccagcaatcccattactgggtatatacccaaggcattataaatcattctagtataaagacacatgcacatatttattgtggcactattcacaatatccaagacttggaaccaacccaaatgcccatcaatgatagactggataaagaaaatatggtacatatacaccatggaatactatgcagccataaaaaagaatgagttcatgtcctctgcagggacatggatgaagctggaaaccatcattctcagcaaactaacacagaaacagaaaaccaaacaccacatgttctcactcataagtgggagttgaacaatgagaacatatgggcacagggaggggaacatcacacactggggcctgtcaggggctggggagaaagaggaggggtaacattaggagaaatacctaatgtagatgacgggctgatgggtgcagcaaaccagcatggcacatgtatacctatgtaacaaacctgcatgttctgcacatgtatcccagaacttaaagtgtaattaaaaaataaataaataaaagcctgggtgtggtggatcatgcctgtaatcccagcactttgggagtccgaagtgggcagatcacctgaggttgggagttcaagaccagcctgaccaacatggagaaacgccatctctactaaaaatacaaaattagctgggtgtaatggcacatgcctgtaatcccagatactcgggaggctgaggcaggagaattgcttgaacccgggaggcggagattgcagtgagccgagatcgtgccattgcactccagccaggtcaacaagaacgaaactccatctcaacaaaaaaaatataaataaaaaattttttaaaagcagaagtaggattacagaaagcagagaagcccaaaagatttgaatgttcactgacaaacacagcaataaagtatttgatattgcaggcttcatttgaagtaaagcttcaggaatacctggaaaccaagctacaggtggcactcagctccctaaccagcctttgccaagaggaggggtctttccagagacaaccatagagagtaatctttagccatgttatcgtctaatatcaaaaatagggggcaggccaggtgaggtgactcacacctgtaatcctaacactgtgggaggccgaggcaggcagatctcttgagcttaggagttcaagaccagcctgggcaacatggtaaaactacatctctacaaaaaatacaaaaaaaaaaattagctgggcctggtggcacatgcctgtagtcccagctacttgtgggactgaggtgggagaattgcttgagcccaggaggtcaaggctgcagtgaacagagatcatgccactgcaccccagcctgagtgtcaaagtaagaccctgtctcaaaaaacaaacaaacaaaaaaaaaagagggtgtaatggaagtgttttaatatgaccacggcatcctctcactgagatctgctaccatttattttattttgtttgtttagagacaggtctcactatgtcacccaggctggagtgcagtggctccatcatagctcactgtatccttgacctgggctcaagtgatcctcccaccttggcctcccaaaatgctggttagaggcgtgagccaccatgcccccatttgtaatttaagctgataaatgagagcaggggcacaagtctgtatccgctaactcttcagcaacagctgacccaaggccagcaaacccattgcatagccaacaaccaaccagatcctgtctttctgaagacacacagagacagtagtcagatggttatgactaataaggctgtaaggttgtttagactgacaattggtagccatgctgggcaaaagggaaagaaagaaaattaagagaaagggaaaagagagagaagtgccatgcagcccctgagtgacagagagagaaactcagttctgacagttttccagtttcaaaacccaaacctgtaaagttgacccttgaacaacacaggtttgaacaggtccacttacccatagcttttcttctgcctctgccactcctaagacagcaagagcaattcctcctcttccttctcctccttgacctattcaacaagaaaatggcaaggatgaagacctttatgacctttctcttccttatgattttcttaataactttttctctagcttgctttattgtaagaatgcagtatataatacatataacaaacaaaatatgtgtttgttgacagcttatgttgttggtaaggcttctgttattagtatcctgttagtagttaagttccgggggagtcaaaagctatgtgtaggccaggcacagtgggtcatgcctgtaatcccagcactttgggaggatgagacaggcggatcacctgtggtcagaagttcaagaccagcctggccaacatggggaaaccctgtctctaaaaaaaaaatacaaaaatttgggtgtggtggcacacacctgtaattccagctactaggaggctgaggcaggagaatcccttgaacccaggaggcagaggttgcagtggccaagatcgttccactgtactccagcctgggcaatagagagactctgtctcaaaaaacaaacaaacaaacaaacaaacaaaaacagaaagttatgtgatatgtagacgtttgcctgtgtaggacattggatcccctaacccttgcattgctcagaggtcagctgtagcttctgtacaggcttgggttctatacttgccttttctcttccttacaaaaccaatcaaaatgagtttcttttccctgtaactaaatttccttgactagaatattgattactgccaattcccacctttcctgtaagttgtaagttttagaatctggttgtttttttttattgggaaatacaattgatttttgtatgatcctaaaattgctgaactctataattgtttatttttagattctgtggaccttttaggtagttaataatcatatctcatgcttcaaaacccatgtaccttgtgttagaataagataggataggataggctctggtaacaaataaaattccaaatctcactacctaatgcaataaaagtgggaaagtcaaaggtggatttggctgcccttctccatcttatatcagtgtcagatcatgataggggaagagcatgctgcagagttctgcaagaagcttttaaggtccagacctggaaatagctgacattccttcttctcacatcccattgataagaatgtctcataacctctctatttaggggcagggaaactagcaactgcgaaaaaagtaaaataaatgaatatttggtaaattataataatctctgctgcatagctctttttatttccttatcttacattgcctaggattaccactacaataataaatagaatgcatctgtcttatttgttatattaacaggaagactgctaaagttttatcattaagtatgattttgctatatgagtgctgaatttttctcttgagatgattaaatgtaaaacaacttttctaagggctaaatcctatatggtcattgctctggactgaatgcagttgcccactccctttccaaatccttacaatgaaatcctaaccctcaatgtgatgttattaggaagtggtaaggggacaaacaagtgaagagacagatacactagagtataagatctatcaagtaataaaggtggacctgtgagtaaattcaaaccatttttctctcttgagtagccatgcttatgacaaagaaattttgaatgccttgtgggttgtttgtttgtttgttttgagatggagtctctctctgtcacccaggctggagtgcagtggcgtgatctcggctaaccgtaagctccgcctcccgggttcacgccattctcctgcctcagcctcccgagtagctgggactacaggtgcccgcaaccacgcccgtctaatttttggtatttttagtagaaacggggtttcacagtgttagccgggatggtcttgatctcctgacctcctgatctacccgccttggcctcccaaagtgctgggattacaggtgtgagccaccacgcctggcaagaaattttgaatgtcttgttttcaacaaatagttttaatttaaatcgaaaagagtgtgtaggtatgagttgcgaatttgtaattcatttgcgattctggtattgatggattgtcttatcttgtacaggtcatttgggccctatggactttaggctcaacaacaaaatcagacagttggagtacagtgccagtcacaatttttagactgtttaaccctaaatgtctttctaataggccttatttatatgagaacattttatagttaaccacaaatattttgtctgtgtttatcaagagttacaagcatagcagccctttctttactgaataaaagttcaaacaaattggattcatctttatttggagctgccaattaaagtgggatatagtatagttaagcagtactcaacatgtaggccactaatctcttagggtcccaaacactctttcaggggctctgccagggaaaaactatgttcatactaacagtaagaacttacatgtctttttcaccttcatccccttcatgagggtacactacagtggagttttccagaggctccatgatgtatgaggatgtagtcactctgctggctagtcgtatacatgtctcagtattcttttcctttaaacacttctctactttaattttcaatatggtactattgatcgatataaagatcagaaacaaaagttctttgggatcttcagttgtttttaagaaacaggggtcttgaaatgaaaacactggaactactaatacacttcacaagtacattttacctccacatagcacagaaataaaatcataaccctgtctcttgtcagcagtatgactctaggtaagacatttaacttatctaagcctcaatttccttatgtataacaatacaaatctcctagcttcatgtgaagatgaaatgggatacaccaagtctgacatagtaggagcaaaaactttgctcacaaataatctaccttaggaaggatagacaagaaaatggtaaactggttgggtgcagtggctcatacctgtaatcccaacaatttgggaggccaaggcaggtggattgcttcagcccaggagttcaagaccagcctgggcaacttagtgagaccttgtatccacaaaaaaaaatacatatgtgtgtgtgtgtatatatatatatatatacacatacacacacacacacacacatatatatatatatatacacacacaaaaattagctgggcatggtggcacacacctgtggtgactcaggaggctgaggtgggaggattgtttgagtcttggagacagaggttgccatgagccaagatcatgccacaatactccaacccgggcaacagagtgagactctgtctcaaaaaaaaattaaaaacgaaaagaaaatggtaaataaataacttttgttaccataagggaggagaactaaacaactggggcatgggggaggagatggggaacttttcattgttgctgcacccttcacttagaaggtccagtttatgaaaagtaataatttagttaaaaccttcaaaaatgatttttaaagaatttccctgctcctcatagatatagcctggtagtttacataccacttcattttctatgaagtactgttgttgcaaatttatctatgcaaagagctaagcatgcaatgattgttgctgtgggtataaaatactgctttgctaaggatactgtagctaactcacagttaattggctgaggcctgagcacacccatatcagtttgccatatacagatttttggttaacttgatttccatatgcaaagtgagaagaaagttctaattcatatatatatatatatgtaaaatatctttctctcctgagtcatcaatctctacctcattattgaaaaattgccatcaatataaaaatatactcctggtatctcccattttttaaatatgtgactccacgggcccctccagctaccatctcctgttcctgttcccctttacagtttacagccaaacttctcaaaagaatatattactattccctgtttctacctctacacatctgttctcccttccacccactccaaccaggtttctgtccttatcactccattaaaaggctcatatcaagacgatttgccacgaaatcaagagctcttcctatgcacagcttccttaacatttcagcagcatttgacactgcttaccacacttctttaaaaaataccctcttctctcagtttcaaggagaacacactgtattggttttcttccctttattgtcctggtctcagcttctattactgatttcctttcggctgctgtccaagtcagcctcatcctgcatctgccactgagtttggtcctgagctctctcttctacttgacctacactctctccttagactattcctagactcattcaagtctacttcttagacttcactctacattcgcttcttcaccccagcccttcagcttaaattctgtccatattcactgataatacaaatacttttgaacacttactctagcccagccacaattagaggcatttggggtttagagagaatgaagtagatgcaggcctttgactctgtggagtttacattctggcaaggaaagacagacaacaagcaataatcataaaaaaatatggtatgttagaaggtgatgagtgcttaagaaaataaatcaggataaaaagaatcaaaattgggaggagacagggaggagagtgggtcagttgcagttttaaagaagagtggctcattgagaagatgagctgaagttactcatgcaaacctatgcataaagtgggttgcaggcagagaaaacagccagtacagaggcctcaaggcacgagcttgtttagtatgttttaaaattttcaacaagactagtgtggctgcagtgcagttttcccaggggaaaatgataggagacaatgtcagaaaggaagtggaagggtgggcagaaagaacaggctttgattatgaataacttgaggaactagaacagggttttgagcagaggagtgacatgatctgacttgtgtccaaaatacacttttgctatgtggacaatgaggatttaaggttaaaaataggctaactggctgggcacggtggctcacacctgtaatcccagcactttgggaggccgaggagggcacatcacaaggtcaggagttcgagaccagcctggccaatatgatgaaaccccatctctattaaaaatacataaattagcctggcctgttggtgcttgcctgtagtcccagctactcaggaggatgaggcagaagaatcgcttgaacctgggaggtggaggttgcagtgagccaagaggctgcactccagcctcagtgacagagcgagattccatctaaaaaaagagaaaaaaaggcaaactgaggctactgcagtgctgagagtgggaaagtatggcttggatcagagtggtagtagtagatgtggtgtgaactggtaggattctggatgtatcttgaagttaaataaatccagtcctatttcctaatgagtagagtagatgtgaaaaaaaagagaaaatgaatccaaagtttttggcctaaacaactggaagaatgaagtcgtcatcaactgaaaaaaagggaagactgcaggtgaagcagcttttctaggtacatcagaatcatttcagtcagggagactgaacactatgggttttgagatagaaagtttattattattgttcattagagacagggtcttcttatgttgcccaggctacactcaagcttctgggctcaagcaattcttccaccttagccttccaaatagctgggactgcaggtttgcatcaccacacccagctaaagatgagcgctttctctaggaattagaccttacgcaattgtgggaatagctgggaaagtgaagatttggggaggagagtaagaagatgggtaagggagttgccaccatgcccattcaagaagccaaggatggccagccaccttagtgtccctaccacagatgcctatggagaggtctatggaaagcaactcctctgtttagctaccatctctgtggggccagcactaagtgtcaggtggtagacctgggccactattggttaaagagtcagcagctggaaagaagagtcagattggagtagaggagaatgaggacaatctggaacccacttgcacctctgtgtctattcatcttcacatctaacttcaaccaacttcgaagagtaatggccactgatttactttcattctccaaattgtatgtaaatgtatctttaatccagaactagatagagaagatatattactgctatatataacaaagtacaacaaacttagtagcttaaaaacaatttctacttgttatctcacagttcccctttgtcaagagtctcaggccttttgttcgaggtctcataaggctacaattagggtgtctgttgggctgtgttctcatccggaggtttgaatggagaaacatttacttccaatctcattcaagttgttagcagagttcatttctcttgtgtgggaatgagagggaggccctggcttcctgttggctgttggccctcatgtcctagagaccacctagttcccctccacaggggtccttcacaggccctctcatagcatggcagtttacttcttaaagaccagctgaaggatttcactttcagtctgctgagatggtgtctgccatatttatggcagtgacatcctagagttttgccattttctattagttagcaacaaggcataggccctgactgcactcagggggagggagaatcacacaagggcatgattcattgcaggggtcaccttaaggtgtgtctcccacagaaggaattctgagatatgcagtttcaccttaaccaatctgacataatacaaacttcaaaaaagggaaaatcaagagatcatatggagacttgttaagtttcagatgtattagacatccaaatgaagaggttaacaagacaattggatacaagactggattttgggagatatgtccaaggaccctcaaatgtgtattcctaattcagtctcttcccaaaactatagtttcattggtctgtctacttgacatcttgaacttaacaagaccaaagttgttccttcccttcccaaatctgttactgctcagacttctacatctcattaaatggtaccctcacctaccctttctctcaagaagaaaaacctaagagtcgtccttcattcctctctttcccttgccttctacattcaatccatcataattctattggttctacattcaaaatataaatctatccccttaattctatgtctaccattaccaccctagtccaagccactattaccccttcctggccttcagcaaaagcctttgaatgtctcccctccctctcttgacccatgttatgaaatggattgtgttcctcccaaaatgcatacactggagccctaacccccaaggtgactgtatttggagatagggcctctaggaaggtaattaagcttaagtaaggtcataaagatgggaccttcatcctataggattaatgttcttataagaagaagagacaccagagatatctctctgcatgcacacaaagatgacacggaaacacatccagaagacagctgtctataagccagaagagaggcttcaccagaagccaaccatgaagacaccttgatcttagacttctaacctcaagaattgcaagaaaatgaacttctgtgtttaaagcaactcagtccatggttctttgctatagcagcccgagtagacaaatgcaatggcctccatatattgttcacacatcagccagaatgagttcttcaaaacctagattaaattgtgtcacacccttgtttacaggccttcgatagttttccactgaaattggaatcagacttgaactctttaccttggcctccaggattgataccatctagctcctgctcatccttttgaccttctcttgggccattcttctctccatcacccagcttggtcgcactagctcctttctgtcaacaaaaacaccaagtctgttcccatcttagagtttctgttctgctcttgctcccaaaactttgtcccctgattcttcacacagatggtgtttttctgcactcttgcctaaatgtaacttcttcaaggacctttcttacccgcccttgtaatcaagaatttcattcactcttccccaatacctaagcccaaacactaattagtgcaccaccctacttattcccttcataatttaccacaatttccaattctctctctatgtcttgatctctctatctccctctgtttatatattgcccatttgtcctcctttataatgtaaaattcgggaaggtaatgaccttgcctcccttgctttctattgtatcctcagagattaggagcatgcctagtgtataagaagctctcaatacatgtgtgtttaatcaaggcttaaataaatctaaagctatggcccaaatgaaaatttttatatgagttttagtacagttttgccactatttccatagaatagattatcagagtgaaattgctgggtcacagtgtatgcacatttttaattttgatagatcagaagtactgctttttaatatttagtgtgactgatttgccactttaaaatttaattatcacaaatttaatttttttcctcttctcctttgaaaaatgaggcatttcaaaaccatttttcccccaatgtttttatggtaactgaagcatcattgttcattttgcaataactctagcttttgctttataggttaaattgatacagccaatttgtctataaagaaaatgtctgtgaattgagtcttctttttgaattgacccctccattacaaaatgaatgatgtattctaaagagaggaaaaaaaaaaccttctcccttttcacgtatcattcttcttttctgagtgtagagagttgttggagtaaaagcattaaagtgatcccagtgttaatatgtggatcctccaagctgaacattttaagtttgaaatttacaattgttataacaattgtcccctgcctaatccattaggtgacagcattagctagaacccagagctaggaatgctttaacacttatgagtacatttgagttggcctcattgttacccagtcgtcaatagtgtccttaacatttccagctgcctcatcactgtttgatatgtacaaggggctgggacaagggtgtagagggttccactcaaacatgtccccagtatcaggagaaaacacacttcaggaaggcatggttctgatagtgggtcaggaaagaaaataggaaaattggttttaacaccattcagttattatacttcctgcctcaattgaaatcaaaagaaaaatccttgtgtctaaagaataattacaaattttgaaatagagtgaacgttccataaagaaaattttaaatcttttttctaagaaaatacttttcctattaccttgtgcaaatggcaatctatacttattggctgaataataattgagttaattaattaattcctggcagatttattatttcattagtcactgaccatgatctataccacgatagggtgaaatttaaaagttcttccattattccttcaaattgcattgcagagctcttcacacataattaggtcttaaattttttgcctaatgttacttattgtttcctaacaaatgcagttcaaaaactttagagtgacattcacagccctctttagtcttatcacaatcccctttccagccacaatccctactattcccctgcaaccatcacacttctgctttgttgaactgccacccaggtatctccagaactttctactgttccttcttctaatccttcatctatttttatctgctcaaattctacatctttcctgacctggatcaaatgccacgtctcaattaagtcttccccaagtcctcaccccctttcttctgaataacaagtatttccttagtatttctctggtgcttattatagcactgccacactgaattgtgtgtatgtatatacattattgatttgctctattagattataagttcctcagagtcaagagtctgtgttacccatcttgtatcttccattgcaattttatagagtcttttgcataaaagatgctcaaaaatgtttaaagaagtaaaccagctgctgagaaactgctaaatgtttgcactgagcattttggcagctgtgtcatcccacttggtgatgctgcctagcacatacacactaaaacaataggcctgaacactaaacaataggccatggtcctaaagggtattttgttctacctttcttgtattgtgagttgatctttgattccggagcaactctgcatgtacgtgtttgctgtcaaaataaatgtcttttttgtctcaccagctgagatacatttaggtgaagatggcactggtaaaggaagtgtgcaggtgaagttggtgaaaatgttctgacaatgtttatattttgcaggcttggaagtctcatgccaagtgaaccatggataagtattcaagtttgatatttgcctaatgcgtggtaaaaaaataataataataatttctgtatcaagactgatttgatggccaggctctgtggctcatgcctgtaatcccagcactttgggaggccatggcgggtggatcacctgaagtccgaagttcaagaccaacctggctaagatggtgaaaccccgtctctacttaaaatacaaaaattacctgggcgtggtggcgggtgcctgtaatcccagctactcgggagactgaggcatgagaatcgctcgaacccaggaggcggaagttgcagtgagctgagattgcgccattgtactccttgcatttcagcctgggcgacgagagtgaaactccatctcaaaaaaaaaaacaacaacaacaaaaaaaaaaaactgatttgaattttgcaaaatagtattagacataaatatgttgatcaacttttggggaacttaaaggttaactttataaatggagaggaaaaatcgtcctgcagaatccacgcctcaaattatctggctttcaaaaatctagaaaaatattttgtgttgatttgtctacattacgacatataaaagtcatccaattgcctggatgtactctatccaaagtcatggcttttagataacagttaatgggagctcgaactgcttctcacattttatttgtaatctaaatcagaaactctaggtctcaggtataatcattccttatcattaagacaaaataaaatataattaatgataaaggatctcggcagttcaacttaagaatacagaggttaatatacttaaatctagattcttctgaagttctctttgcacaaaaaggtgaatttttgatgtgacttattctctggttcttggtattcatcataactaaggaggcaagggaaccccgtgacttggttgggatgcagaagccaaaactcatccatttcaggataaagagcccaggataagggagaatcataaatgaaagacaaagccagaagaaatcccactggcttagaatgaagttgatggtgaccaggaagattaaccctttccaaaatataatatggacacgtaatactctgttgatgaacacaagagtgcctatacatcattgttttggttcattactgggagcagggtaaaaagattcctaaggtctacagtaagtgagcttagtgaaaatacaccccaaagaccagagggaaagctctggaaactgctggatcatcagatcaatagactcaaagatgactaagttgggaagctttatgcagtttaaacatttgtgcagggagtatccccacacagccttttattgacagctacagatcaatggtaatttttgatcattttcaacttacataaacctattgaccccatggccacctttggggcacttcaagtcatcaaaaataatcagaggagatggtgtaaaattgtcagactgctgaagactccaagtagttgcatatgtccccaggagctgagtcgagaggttaaaatatagttcaaattgccagcagaacctcaactgacagagtgttccagagagtcttgtctttatgtctcataaaatgaggcactgatttgtatccaaactctgaccttcatgcatataaagttaaagaaggaaaaaagaggctgaatcccattgaagatattagattgcaaagaatggattattcctagtaaaatatttcttcctgtttttctttgttgagtcatcttcttcatctgctgcctaacaaaagtagctgacatgcttgtagaattacgtacaatatggacgtggacatagaatgaacaaagacaaaacagaagcaagtgcaaggtggcaggccagaagtcagggacaacaaaaaatgtagtcaaaaaaatcattaggaagagtgaaaggaaggaaagagcaaaataatggcaataaaggggaagaagtaagagtattgaattaagataatctctatagaggaaaaggagtgagagaagaaggaaagggtgaataagaagaaagagaaaggaagaaacggaagaaaagtgaagcaaaggagtaaaaggaaggaaaatcgtctttagtgatgacttttcctagttagtaagacagaacgctacatctccaaaggaaggaactgaatccaaaacatctaagatccacagtgctcaagcaaatatcctaaatttaagaaaaataacaagaaacttagtacgtaaatgagagccaacccaattcacagagtgaactgcatccaaattttgcagcaggattctaaaatagtgaactttgatgttggaaattcattcaggagagaataatataaattatttcctaaaacgtcaaagaataaattggcaaggattatcttgtcatttttatgttttcttcattttttaatatagcttttactaaacattgacaaaaaccatggctattgtttagatctatttaaggagtctatatgtggtttgtgtgtgtgtgcgtgtgtgtgtgtgtgtgtgtgtgtgtgtgtgtgtgtgtataaaactattcaggaataacaaagtagccagatgcagcagtggcttgcacctgtaatcccagcacttttgcgcagccaaggcagaagggtgacttgagctctagagttggagaccaacctgggcaacatagtgatacccaatccctacaaaaaaaggaaagaaagaaagaaaagaaacattttgttttaattagccacacacggtggtacatgactgtagtcccggctactccagaagctgaggcaggagaatcacttgagcccaggagttcaaggctgcaccgagccatgatcatgccacactccagcctaggcaaaagagccaaaaaataagaataataataataaattaaataaataaataaataatgtaatatgagaacttgtcctcagtataatttcatgatacagaaattacttttacatcccaacatgtggttatttctctcccttttttttttagatacatgtagaccaggttaagcaaaacaactgttgtaatgaccctttgtaggagtatacccctaaaaattttctgtgccaggcatgcatgaacttcagcttgcaacctacaggccatatttctatattagatggtggaggtttggaagctagggcattttgaatacttctgctttcaaggatctgagccgtaaatgtttattaaacgaatctataatgaaatcagttttgttatttttttaatggttgcctggagtgtgttggatgactgaatgccagttgttaatcattaagtactcatgttaccaaaagtgtttgatagtattgccatctaggggctgaatggaattctcagctctgaaataaattataattgagcaggtgcagctattgacaatatacatatgtttttgctttatagcccacatgcttttcatgtttcttatgacaaaagcttatgaaaaaatgtcccccagcagcccaccttttttatatataatctgttagaggtgattactatttgctttggagcgtatgcttttttggcatctattactgaatattctgaacaaagaattattcttttttgcattattaatcttgcccatgtttgccctatttccacagaaaaggaatcatttatcagaaaagagtgtttgtaatcgggacttgtagcatcttcagatttaatattcattatggtcattctagttctgtgctatatttatctaaaaggccaatccaatgttatggagaaataagtttttaaatatttatgatctaacttttaatattttaaaaaagagaaattagtatttctgtaaaatttgtttcagagtctgattgctcagcaaatgtttaaatattaaaagatttcaagaggttagcgtgtaatatcataatgggacttattgaaataggaaaattgactttacaagtttttgatatgtgaaggaaattgtattttctctgcctatgtttaacacataacaagaaataacacagttaaaatatacagccaataatgtcagaaaacagcaccaaaacctatttctacattgttttgtttttgtctaaccagtttgtttggaaaacaattctgtttgattttgtcatcttgttttagattttatccaaaatgatatttggatgcccccacacataattttttctgatgttcttgggtgcctactttcagaaataactttcactactccactttatattcttcttcccttgttcatcaaggaaagaagacaattgaagaccatgtatcacattcaaacatctaataaaccaaagcagatcattgaatgtaaatatcctactaacccagtcaaaactttctcatgatttcttatatccaatggggatggtacgcaacagaaaatgccagtgtgtgtgtgtgtgtgtgtgtgtgttcgtgtgtgtgtgtttacctatgaacacattactaccccacttgcatacataattcctactttaaaaggacatatcctttcagtccagatgtggaaagagcaccccagggcctttagaaacattaggattcttagctccagtttagttatgccaaatatgttaatgctgctctccaagcagaaaaacaaacaaattttaaaaatcctaattaggctatccctttttttcttttcttttaaagcaacaaagaccaaattctccaagcctagctaacaattacttttggtaggtttcatagttttacttatggtgcttttaacaaatgaaaatatttttatatctatattaataatagacttctctaagggtgtttgtacatgtatagttgaattggcttgttactgttttcttgtgtttatttgttttattgaattcgtaagatatatatacatgccaagagaatgagagagggagactgggaagatggagagtcttgtgtacaaacagatttggaaattaggggtgttcaggttaactctccaaacccttaatattaacctggcaggcaattatcccagtctcagacatgcagcttggcaccactgatttccattttgagctggatgcagcactgatctgaagcatcatgttttgtttttttttttaatgtttatatatcacacgctttgggctgcaagcactgaaaagtcaaggatgctatctggtccactttctgagtgtctgaaatcatacaacattgggtaatatattcacggtgtcaacaagaataagaaaaaatgcgttgttttcttaatgataattcaaaactctgctgtagtgtttgcgctgctgttgcctacaagctttggccatgaggttcagagaatgactttccagcaatattgtcagtttcaaaaaaaaaaaacaacaacttaacctgttaattttcttacagggaacaagccatcaagcccacctgtacgggttagaaccattcacaacatatcgcattggtgttgtggctgcaaaccatgcaggagaaattttaagcccttggactctgattcaaaccttagaatcttccccaagtggactgagaaactttatagtagaacagaaagagaatggccgggcattgctactacagtggtcagaacctatgagaaccaatggtgtgattaaggtaatgtctaccctgcataagaaattatgtttggtgttctccagataaatagatgagccctgacatgccatcaggtcactgtgggaaaactcccttcacagcctgtttaattctccttgatagctcctccaggcacttaatcatagatcacagaaacctagcttagatgtgtgatgcttcctataacccaacactgagctaaatgctctccatggattatctcatttaatcctcacatcaaccctactaggtgggtaccaccaaacctcatgaggcatatgcaggctaagtaactgcccaagcctacactgtaagtaattgagttgggatttgaagccaggaactcacatcagaactgaactctaaatgactgtgttcttactgcctcctgaattaccctacccagttatttgcttaagacttgcctaatttatgcttcaaacagagctcattaagcaagccacaggtgtctgctaacttcccaacttctgtatgtagccgtgagaaacaatgttataaatgttgtatacgtatctcaagctctgccagcccatgagtacagggggactgtattttcatgaatagcctgcattttgatgttttgaaccttcagccacacaaaaaccagccttcatctacctctctgatgttcctccccaaggatggtggcagacatacctgttagttcatactactgcctttacctccagtctctcctggccgtggtccatctcttaggccctcatcaactaccttctgcgggctgggactgcagagtcccccagcctgcagctgctatagacacactacccttttctttgccactccttctccaagaggcagactcccacatcaattccacatcacagggttgagactaagctgttacttttaataaagcctccctgaaaaccctaagagagggatgacagcaggaaattacgtgcagcaataactaagaactgtaactagagctcacagtcccaggtccatcctgtgggctgcctctctgcctagcttcaaggcctgctgcaagtagcagtagcaagctgcttcccaccagcctgcctacatgtggacagaagccagacttctcccccctggggcaagaggcttgagccttaggattcatgaccttaaaatccaaatcacggccccaaggcacccatcagaaaagaaagctccttttccctcaaagcacttctccttgtgggtatttggagtcatgagagcatctgcttcttggtggcataattgacaataagaatattgactccttggacctttatttacatttcaccaaatattaagcaaatatttggtgaaatacttctactaagtgccatatacttattcaagagtgaacaagacagtcaggttccctgatgttacagaccgtgtgtgagtgcacgtgcgtgtgtgtgtgtgtgtgtgtctgtgtgaataaatgtggcagagtatatgaatggtgggggtacagaaaagcaaacaataagctagtaaataaataagcaagggaattactgagagcgatgaatgctataaagaaaattaaatagaataatgtaattatgcctgctcaggctattttagaatggaatatcatttgaatcaagttgacatttgagctgagtcctgaatgacaagacagagttagtcatgtgaggatatgggggcaaaatgttccagacaaaatgaacagcaaatgcaaggcctgaagccaggaatgaacttggtgtattcaaggaaagagaagaaagctagtgtgtatgaagtatttgggagaaagaaagatggcactagaagaggttggagggactggtaggagacagattgtcccaacattgtaggctgtggtaaagtttagaatttgttccaagtgcaatgaaaaattactgaaggctttaagcaaaggaatagcatgatcaaatttacgtttttaaaaatcactctggctaccctgtggaaaatggactatataaggaccaatggagtttgagaactattaaagatttcaaggtagaattgaaggtgggtcaaattagagtagcagttgtgaaatcatgcactataggtgaatcgaagatacattcagaagatagagatgacaaaatgtgttaatgagctgaatgagagacatgaaggaaagggagcgctttgagatgagttttgggtttaggctttgggctattgatgaggaaggggagactggaagatgaacaagttaggagcaagtagatagtgtgaggtacaagtctaaaactcctgagagtgttctttgctgggataaatgttcagaatccgttagcaggtggatgttatataaacccatggtgccagaggagatcagctatggagagaatgtaactcaacctgttgagagtctgggatcaagccctgaggcataaatgtgggggtcaagaggaggaaagagagccagcaaagactgataagagggaactaggctagaaggaaaagtgcatgagtggagtgtccaaaaagagaagagaaaatatgccaaaatgttgctgagagcagaagtaaaatgaaggcagagaagccaccccgagtatagaaatgaggaggtcactgtgatctcgacaaggagagtatgcagtagaatgggaaacctggttggcatggctggttgaggagagaatggcaagggaggaagtaggacatcaactcattaaagccatttagatgaaaagaaaagcagagaaatggagcaataggtggagactgtgggatgggaagttttatttaaaatcattgaaaaatactagagtacatttaaacacgaatagaaataaccagtagagggagataaactggtgacgtaggagataatgagaataacggcagtagtgaagtcttggggaaggaggaagggatgggatacagcgcttaggtggccttcagtaggtacagagatatttcattcatagcaaaaggaggaaaagcaaatcatgtaagtctagattcacatggatacagaggtcagaatatataacatggaggcattcttctctaactgcttctattttcagtgaacgatgtggttatgtcaacaatcaatcaacggtgagggagggaagagggtgttagtggttaggggaaaggaagaaatatgaaataatcacctgggaaaatgacagagcaaaagcatgagggaataaaataggattacaaattggtaatcgcctatttaaaatgtatggatagaagtttaaagtgagaccaataaaaatgtttgggtgtttttctacaaacccatttcagagcttgagtatagagggacagctaaattttacactaattagagatttgccgggtgaatatcaggggcagcaaggggtgcttggggggtcacagaggctgcaagctagttatggaacctatgctcccttcagaagatatggcagtccccttcccacatgggggtggtcttgccctgggtcctcaacaagaaaatcacaccaacatacaacattccaacataaagaggtttccaaacttctaggctgtgtaatcttagggaaaaaatggagtatgttaacaatttagtctaaattaagcttgcccaagaaccacttctgggaatgtttcaagggtgtgccttccaagggctgtaaaatgtgtcctgtcccctcttgagagtcaccatgatagggagtcatcgaaaggagtgtgtcatctctctcaggtttgttggagcaggaaaaggttggaaaatcactgttcaaaaacacctgcattcagattaacttacttcccatctttcaaaaaaaatgaaaacttgctctacatttgtacagtataataagcattcagatgtttttttccagaacaaaagactactttgcccccaaaggagcaatcagttcttccatggcctggaagagaaaacagggtgtttttttccatcccctagtcataaagatttatatacatgtatatatgtacatgtatatatatgtatggatatttgtacttatgtataaaatataggtgtctgtgtgcctaaacacacacacacacaagcatactctttcagccctggcactctgtaacaacaaatgattaagcgttgtaattccatttcccagcaaatgccgtggaaggtagaccctactttagtcagtatgagatcagaagcagttcatatccataaaacaggagactttaatactattctctactttaaaaaaatacaaataggagaaaccttgtgaataccatttaagtcaaagaatctgattcaatagcccttagttttgagataaatgtttatgtagttcccaaactgaaaaaaaagaaaagaaaaaggcaaagaaaaacattgtttgtctctctgtgggccttatgttaactgaaaaaaatcacatatccccaattaatatcagaatacttcttctaaattagggtcatcaaaataaggaacaagggggtgaaggttaaaaaggggctaagtaactacacaaagaaattgtatgctgcaagttatcccttttgcttctgtccttctgtagacatacaacatcttcagtgacgggttcctggagtactctggtttgaatcgtcagtttctcttccgccgcctggatcctttcactctctacacactgaccctggaggcctgcaccagagcaggttgtgcacactcggcgcctcagcctctgtggacagatgaagcccctccagactctcagctggctcctactgtccactctgtgaagtccaccagtgttgagctgagctggtctgagcctgttaacccaaatggaaaaataattcgctatgaagtgattcgcagatgcttcgagggaaaagcttggggaaatcagacaatccaggccgacgagaaaattgttttcacagaatataacactgaaaggaatacatttatgtataatgacacaggtttgcaaccatggacgcagtgtgaatataaaatctacacttggaattcagctgggcatacctgtagctcttggaatgtggtgaggacattgcaagcacctccagaaggtctctctccacctgtgatatcctatgtttctatgaatccccaaaaactgctgatttcctggatcccaccagaacagtctaatggtattatccagtcctataggcttcaaaggaatgaaatgctctatccttttagctttgatcctgtgactttcaattacactgatgaagagcttcttcctttttccacctatagctatgcactccaagcctgcacgagtggaggatgctccaccagcaaacccaccagcatcacaactctggaggctgctccatcagaagtcagccctccagatctttgggccgtcagtgccactcaaatgaatgtatgttggtcaccgcccacagtgcaaaatggaaagattactaaatatttagttagatatgataataaagagtcccttgctggccagggcctgtgcctgctggtttcccacctgcagccttactctcagtataacttctcccttgtagcctgcacgaatggaggttgcacagctagtgtgtcaaaatctgcctggacaatggaggccctgccagagaacatggactctccaacattgcaagtcacaggctcagaatcaatagaaatcacctggaaacctccaagaaacccaaatggccagatcagaagttatgaacttaggagggatggaaccattgtatatacaggcttggaaacacgctatcgtgattttactctcaccccaggtgtggagtatagctacacagtaactgccagcaacagccaagggggtattttgagtcctcttgtcaaagatcgaaccagcccctcagcaccctcagggatggaacctccaaaattgcaggccaggggtcctcaggagatcttagtgaactgggaccctccagtgagaacaaatggtgatatcatcaattataccctcttcatccgtgaactatttgaaagagaaactaaaatcatacacataaacacaactcataattcttttggtatgcagtcatatatagtaaaccagctgaagccatttcacaggtaggtagccatgtctcggttttctgagagtaagccactgctgacctttctattgcctgagcccttggtcagttctaatgaagactctaaaaatgggatgcaaggtgtccccaacctccatccacctaaacgtgcatagtagacaaagcacatcctcacccaagcaaagcctgcttgcataacctccagagagcagaattctttcaggtgatgttttgagagtcagtgtttcagaaaggtttgcaatgcatcctggtatctgaaataagtaggacagagatgaggctagtccccctggaaatacgcaggcccctggacagttctgacagccccgatagggtcatctggccagactgtgaagaaaatgatgtattattttaaggttaaaaagtgccaatcaatgagcgcaattaccagccagagttagactaaaacaaaatttgtttcgtgaagagccttcttatcaaatccagcacttcttccaggaataataaggcttctctgactctactttcttatggtttctcaggacagtgccactttgctagctcatgttttcctagcggtcccatctgggctctgtgacatgcatggaagtgcgttgttctccacacaaaagaatcttgcccattgtttaaataattgtttggcagttttccccatcacattttaagtaacttacatccccagagagaagggtaataagagacattttatgcttaaaatttagtaaaatgaacagaatcacttaaaaaaattaaaggctgaaagagtgttgatttccaactacctcaggtaaaattcagctattattgtaatctagtgatgtgtagattagatcctcctataattacctctgatatatagtgctgttgaaatgaaacattcgtggttttatgcatctactcatgacaattatttagggtctattaaatattaaacagtaattaaaacttcctcaggtatcctctgcagctaatccacatgctatgtgagttggcttttatattaccttacactgattcagggcattaaaaaggtccactgtagctgcagagctgtatattctagactggcttcctctttacctgactgtacctccaactttcaaaaaccatatcaatttgctcccttttgaaactcttattcaaaaagtattctagaggtgaaagagtttgtccaggcatgaaaggaatgctttttccaggctggaaagaaaagtttaatttatctgataaattgcaaggatatttaagaatgtgagagaaatctcttcattatccactctaactgaatctgtaagtggcattgacataaaacagagtatcacttctatatgaagttggagttcatgcgtggttttttgtttttgtttttagtggattaatgttcactgaatattgcaaatgtgtgtgtcctcctttcagcacccccagctggtcagtaagaagaaatagtctgggaaagtcctaagtagcagaaggaatccagcccaaaatttaaaaactaccacggataacccagaaaatgaataatctttatgtgggaaatcaaaattgacttcacagaattgcttagaagtcagatctaccatacacagctatggatttgatcaccaataaactggtagccctgtcatggtggagatcggcatgagaggagaaccaggggaggaggagaagaaagtgggaataaaataagtcacaaagggaaaaaggtgtaattaagaaagcaaaaaggtggaagagacagaacatgtacaagaacagaaagcagtgattcaaagagcaaagaggggaggtagaaaatagaagaggaaaaggctagaactaaaaggaataaaggtagaaagaagatagctgggtgcctgcgggaaaattgaaggtgtcataaaatcaatggtggttgggaatagagaaaaaagtgctcatttacagccataggcactaaatactcacaaaaactcattttgttggaaaggagaagtccctgctatgtaaatagaccttttcaagtagcagagaccagctatgaggcaaaacataattgattagttgaatttaactggatggtgataaggtgtcttcatgattgataatctggtgtgtagttgggttaactttggccccgcaaggtctttgtatcatgtaagggaggctgttttaagctgttaggtatcaggtgaggggatttattaccactgagaccgtaattccatgatgttccttcatgacctggaaacattcctgggggatcattccatgatgttccttcatgacctggaaacattcctgagggatcatttagctctagctgcaaaggtaggagtccaggactgctgagaactgcttcatactttctaaggtctgcattcttcattgctatgttaagtaattctgaagagtaccagaattttcatgccggaaagaatcttgagagttatttattccatacatccttgtttaggggaagaattgcactcacccctttcgaacagatcaggaactttagtttagaaagccagggggattttgattgttcaaaaatttccatggaaatataatttttttttgagacagagtcttgctctgtcacccaggcgggagtgcagtggcgcaatctcggctcactgcaagctctgcctcccaggttcaagccattctcaactttgttattcttaagaattagctgtgaataagaatacatgtaagcttgtcttttttttttaaggcctggtgttttaaagattcttcccatgaaaatctattttgctgaaaatcactaatttctgccttatgtcctgaaggtatgaaatacgaattcaagcgtgcaccaccctgggatgtgcatcaagtgactggacattcatacagacccctgagattgcacctttgatgcaaccccctccacatctggaggtacaaatggctccaggaggattccagccaactgtttctcttttgtggacaggaccgctgcagccaaatggaaaagttttgtattacgaattatacagaagacaaatagcaactcagcctagaaaatccaatccagtcctaatctataacggaagctcaacatcttttatagattccgaactattgcctttcacagagtatgagtatcaggtaagaaatgtgtattataaacaattcgagctgattgtttgcacccgtcagcacctgcctgtaaaaatggtgcacaatttgaaaaggcacttaaagaaatgtaggacttaaggagaataataatattccttaaaaatttttaagtggtaaatgaggaaaaaccatgttcattgcctttttcattttcttggtttttgagccatattatatacgttgtttttcttaagtagattccaggtgaatttgcatttcttattagtaaagtggtttctgccattaagattccctctgtcagcgttgccttggtaggagacactccttatttaaagatcactttgaaaataactcattactcgtaccaaaataaaatcaaatagcaaacatctctagcctcggtgctcaagaaagatacagaatgttgaaaaaagtctagaggaatacaactcacctgcccatggcgatgagttaagttttctctgaggatggcctaaaaaaataagactgcattcttaaaaagccaagaattaagaataatattcagaaaatatggtgaattctgtggaggacttctgttaggtttgttttgttttgccatcagagtccatttgcattcttcttgtgataacaacctcatttcctgtgggagaatgtgcttcccccaccctttgctcaggcgtggtgggagtgtcaatcaatgtgtcaggctgtcttctagccaagtggtgggcacatgagccgctcagcccctcagatttgcctggggcttgatcttcagcagagtgactcagaattttaaaaggtggaggtgagaagtcgtgataaaatatccctaacctcaatctaaaagtttttcttttccctgctatttccaagcatggttcttcaaccgttcttttaattccataaactcacagtaaattctcatttgcttaagtcagaatcagtgcctcttgcttgcagtcaaagaaagcttactgactgatgtaagcacttaagtgccaggaacaatgccaacagaaattttctaaaagaggaaactgagccttaaaaagcttattataacatgaaatactaaaaataataagtcaccaaaaagatagtgaccaaatcaatgagtacagtgaatacagggaacattttaagcatgaaaagaatattttaggacaataatgtatgggacaaattaccgaattaataagatttaaaaatataaataaattctcgaatggtttggaaaaatacacagatataaatccataatcccttgtttgcaattccaagtctaaaaatctcttaaaagtattttcttgctttaccacaagtcatttggcaacaaaacccaatctaaacagacttgagactatttacagtatttatttatcccatttaatatgaatatttatatgttttgctacaaaaatattgctttattataagatggctaatcagatcatggtatggatattacaaaatatacagtatatacattttatcctatttcaaaatctaaaaacaaaattattttaaaacacatcaggcccccaagggtttaggataagaattgtggtttatgtcataaaggaacaaaatacttaccgatgccaccatcggaaacgtaacactgttagaaacagccagaacctacgtgcctgcccttttgttcttttctcattacctttattgagaagtgtcacgttatcaagctgtcagttatctagtctcccttacaaataaaaatggtaccttcgtgagagagctggatgaaatcagcataaaatcttcagccgctaattaaacgcaacttaatgacccatatataagaaacacaaactttctctggtattgtgttgtgtcattgggttaaattctggtcacatgatctgtggaagtctcattccagtttttgtttgtttgtttgtttctttgttcgagacagagtctcgctctgtcacccaggctggagtgcagtggtgagatctcgagatctcaactcactgcaacctctgtctgccaggttcaaacgattctcctgccttagcctccagtgtagctgagattacaggcatgcaccaccacaccaggctaatgtttttttgtatttttagtagagacagggttttgccatattggccaggctgatgttgaacccctgacctcaagtgatcagcctgccttgacctcccaaaatgctgggattacaggcatgagccaccatgccaggccccatcccagttttctatggaatggaaagctccaagcatgtgccttgtctctagtcagatttttcatcaggcactaaggatgactaagaacaaagggacccacatttcagaggagaggcaagttaagaaccttaggctgtgtggtttcttttgtaactgttactatcggctctgtgttacactcctcctccatactcatctcactcaaatgaaagtatttaatttggtttttgatctccaatttttatttattagctaatcccacgtagttacaacataaggatagaaaacaaagaaaatcaaaatctagcttagcccaaaggcccagttcttatggaaaataatattttgaaaagcatagattaaatgctgaaataaatgatcagaaaatattagtttcatttagcctgtgtaaatattgagtctatgtggaccctgagtaatcttacagaagtcatttaggaagttatatactaaaacaatttatttttctttaacaaaagagcatttttgtatttgtgatgaatttgcattgctctcaaaaccacttgagggttacttcatctgcaagtggcctttgaaaataccttcattgtcctatataaatctgctcacccagcaactgacagtgatttcacccttctgcagaggagtgtgtttttgaggtaattgtagattgtagggaataaaaacaaagacctgagaaacttcctagcagtggggaaggattaatcagaagatcgtgaggatgtatagttggggaggttgccacccacatggtgtgccttgcaagtatcagctggggctccccaccaccttcctacactacattacatcattgtactcatttctggttttgagttaaatcattgaaggcagttgttaaaatttagttatgtgaaaagaacaagacagttttcactagtctaaatcaactcattccatcagttggccagtgatagaagagggtatcgcatggataagttcttttgtttttctttcttcttttttttttccttcttctttgtttttttccttcttcttctttttctgagacacagtctcgctctgtcacccaggctggagtgcaatggcacgatcttggctcactgtaacctccgcctcccgggtttaagcaattctctgcctcagcctcctggtagctgggattacaggcgcccgccaccatgcgtggcgaattttttttgtatttttagtagagacggggtttcatcatcttggccaggctagtcttgaactcctaacttcgtgatccacccacctcggcctcctaaagtgatggatgagttctaacgggcaggagggtcaggaaatatctggagaaatggatacttatagagagggaggagctactcactgcagaaaaccaaagagggaaattaaatgagcagcaaatgtcactcacctcaccacaattcatataaccagcttgataactagctcctttgaaggtgagcaaaatccatgtgatatcacaagcaccttctaagtgttcactaatacttcaatatggaatgccctaaaggtagcatccccactgtttacagtacaagtggaggacctaagagcttgttcaaagggcagactcctgggtggaatgggaagggaccccagcaaccagtattttttttctttttttgagatggcatgtcactctgtggccatgctggagtgcaatggcgcaatcttggctcactgcaacctccaactccccggttcagtcaattctcctgcctcaccctcccaagtagctgggattacaggcacacaccaccacgcccagctagttttttgtatttttagtagagatggggtttcaccatgttggccaggatggtctcaatctcctgacctcatgatccacccgcctcagcctcccaaagtgctgggattacaggcgtgagccaccgcgcctggcctagcaacctgtacttttaacaagcagcctggatagtccacaacccacttttttttggaaatactgcctcagagggtgagacattgctgctatgctacttaagccttattttcaagcggtgattttctgaatcagtggttctcagctttgtgcattagaatcacctggggaaatttcacaacattctgggtgctgatacccagtccccattcccctgtagttctgattctgggatgggttctggaatccctgcgattcaaaaggttcccaggtgattctcatgtgcagccagagttgagaatcactagcctaaactgtcataaacagcccaaataagtgaagccagctccccacaaatgcctaatttacatgatgatcattgataatagcctattgacgttggtctatcctggctttcctaaagaagggtcctattgttttgatgtgaaactagaaaggagaacagaatatattatctacaaagtccatgtctcagctactcatataatttattttaatcttcctcatggattttatttggattttgttattgttgttttattttcttttgtttcttacttgggaggtccggtctttggtggtaagagtaaagttcaccatcatttaaaacaggggatttttctagtttgagtcatttcagcatagcttccagaattctgggattctgaaggataacactctggaggattagctttaataaagccagtgagatctaaaatatgaatcaaaaaattaggaatattactttttcttgttttccacaagaatgggttggtggctttacagagtgcactgcagggtcccattagaaagcaaacattctctgtgaatttcaaatgcaacttagtttaccaaaatctaattctcaaacaaccctgtgaatgtatgttccatgcataaatgcgatgcatctgtactaaataaaattcttccattgcacagacctcttccttaaacagagatcacagtcttgcttgtgctacagaatatttacaaatccaagaagatttttttaaagacaataatcatttctatcttcaaccctttcaaaattgggctattctaatacatgcagtgtgaacctccaaattctatgtggagcagttcttaactgtttagcagcaaattaagacaatatttttcccacaggctttgagagggacctgggtgtgagtctactctgttaagacattttggtttttacctttggggagtgagctgaggctaatgaatagctctcagtaattgtgcattcatattcatactcttgcttaaggcaaagactcaccacggatttgatagggcccgccaccaccccccctttcactgattcatgctgtcagtgacttaattagttttcctgaaactatctcactttgacagatttttgcggtaagcacccacgcacactcagggtctctgaagcattctggtgcctcatgactgggtgactgagaagcagtaggtcagtcttagaggaaactctgtgactcatggcatggggtctgaacttagggctagtgctgcaggagcccatgcagaatggcagtctgctgctttctaacagaccaacactgcccccaaacaagaggatggaaagaagggctgtggaggagacacagaaggggatcctcactgttgctgccagtggcagctgcctgaagactgccagaggtactgtggaggccttccctgcaccagcccccaccataggctaccaaatcgttggcgatgagttagaagtgggagggagaaaggccaacatcttctactccttctctcactacttctggatatttgagcacattaacctctttgggcctttcctcataatataaattaggcctgctatgatggaatatcatagactgggtggctttaaataacaaatatttatttcccacaattctagaggcgggaaagtacaaggtcaaggcacctgcagattcagtgtctggtgagggccaccttctggcttacagataatggtcttctccttatatccacatataccaggtagaagaacactagtccccttcatgagggctccaccctatgcaacctaataacctcccaaaggcctccataccatcatattcaagattagccttcaacatatgtatttgaaggggacaaaaacagtcagttcatagcactcatctataaaaggaagcaccctccagctctgtattctatgggcagagtagtggtaagctacaggtatataatttttagaaagtctaatcaaactttatcttctcttgattggtttttgtaatctacagtttgtaaaaccctacaaaataaattctcacccaaagcaacagaattttctaatggtatttagctttaagttgtgttgatgcaagtgaatgtatgaaatcagcttcagataataaatggatatatggttattcatcaccaagatggacacatggaaatataattagttgtgtctctcattgaaacctaacatatttattcactaatatattttttaaagtatagctatattataacatatgaatgtaaataaataataaacttatttagttagctacaaataagtctcatttatgttcctgagaaaacccacactatcaaaaagttgtcatgactatttcactacaagtaacagaaagccaatgtaaactaagttaaacagaagggaattgtttctgctctcgcatctgggaagggcattgaaggaatcccttgaaaccaaagaaaagatatgaacaccaggtcctggaaacctgggatgcaggactcggatgatgtaggattcattcattctgtccctccttgccccatctcagcttgtctctgtttggcttcattctgcacactttcaccaggcatctgaggaaatcactcccagattcaagccctttctgtgcatcagttttcttgtctttaaaatgtgaatagatatagcattggactcataggcttgctctgaggttaaatgagttaatatgtgaatgtgcttggaacagcacctcatacatagaaaccacttcgcccatataacaataatgattattattattacccatccaccttagagtggaaagaggactataagtcaaccaatacaggactctgactgatccttttgcactacctgccttcctgtgaaccaagagaacagaggactatgattgagcaggtgtggtcgcagggcccacctcctacaggcagggctgcatgaggtatgcgggaaatgcttccagccagaagcaagaactgccctagcacgctacacacaccaaccacgggaacaagtactccacacctgtgagatattgacaatccttgtgctctttcacattggatgctcacacccttcctgttttccaaatgaagaagctgagttaagatcacatagcttgtgcaagaaagatacttaatttctgataacttcacctttctcatttaaaaaaatgggtgtgttatgagaactaagaaatctgtgtgtctagtaggatgcctgctacttagtaggtccatgcccccatccgatccccccaggatctcactagttaaaagaaggagaaactttcattcaagactgtaaaaaagccaggttaagacatttcttttgtctatatcaacaagtcattgataaaatgttagagtgtaaaaatctcaatcaggagtacagttgcctctaaaggtgtgatactccttccgctaggaagttcaaccctcctcatccttgccatttctcttctcagaaaaagagtaatttacccacatacccatgactaaaattccaaactctgatagtctgactctacttttatgcaattagctacttgctttgtattgcctgttttctattgctgtcacccttaccccatctcttttctatatcacatttagagaaaacatattgaacacattttctgtttagttttggacttgcatttaattaggtattaatctcactaatgtatttccgaccagcatggaggtttttgtctggttaatttctcccacaagaactaagctccccacacccaccccaactcccacagctcaaggttttaaatgatttattgatattgtctgactcaggcagtgtatttattctaaaactttagggcctgagtgcacaggttagactgaaggccactgggacatttccatgtatagaaaactaaagttcgccactaggcccagggcctgatcattttttgcatcgagccttttgttcccacgggagatcatttccacctgtcagtgtgagcacattcaggagcatgctctaattctttttgttcttgttccatctctcatggcaacccttaggactttattctgaagcttctgttgttggcaatcttcatggcgcctttgggacaagttatccatgtgaagatgggttggttctcaccctcttgcagatgcaactcagatttatatttcacttaaggtgatgttgatcttcctgtctctgtgttggaagtttgtttgctgaaaataaaatgttaaacacaacagatgctcttcaactgaatgtagataatatgccattccagcctgccctcatggctcttcagatggccatgaaaacaaaggctcccaaagtcacctaaaacttaggtcctgtaaaaacatctaggaaagggtaagatgtgttttacttattttcctccatcctgtaaattgagtatttaataaactgtccttattaagcacctacaatgttcaaagtgtatacctagttactaggattgaggcaggaggctaaaatccatgcactctccccttcagggacttaaattatagttgataagtcaaataaagatgcccatgaataatgtatccataaaaatatggctaggaacgttgatgtttgcaggatctgagtgatggcaaaacagacccagggaggaagaagcagcttctttatcttcagggacagcacgatttccacaccaaactctaaaggccactcttattctactctctggccagatggttttgtgcaggacaggtggcaccttgatattaaagaggtacttgactaaaatcattccacagagacatgaaggggcaccatttctctgttccttcagtcttacaaaaagaaatccctttctaaatctccatccttatgtttagaagcctctcttagcccacctactgttattggtacccatgtaatggttcaaaatattctccactgtatcaatcgggatctcagcaggaaacatatggcacattcaaagggtatttgaagaaaatttaatgaagaggctatttatggaggtgtgggtagaattaagagaatcaataagggatgttgaagtacccagggagtaggaagagccagaagctgttaccttctaggcctgcagggacaatggaagaaagtgggtcattgagaggaaattcagccttgtcaacatgcagtgccaaagagaggagcaggagaaacaaagaacctgaactctctcttccctttgatcaaaacctaatggaaaggagccagaggagaaaagattccaggtgaggcagtctgatgaagtcagcattccagagtacagaccaagccagagaagggcagaggatggatctggggaaaaaccagctcgtcccccacactcagattgatgctgcttctcaaccagtatataataatgccttcaccagtagaatcctttctgggctagaggatcacctggccagctttggcttgtcaatctatgattattgataaaccactaagtaaatctgaagacttaaggaggattgtacttaagtacttgaaccaacagcttattacctttaaattgtaaataaacatctcaggatatatgaagcaatctaatctgcaggtggaaacaaaaatgttaacacattcaaataagtcagatgccttaaatggtaatttgtaagaacatagttgagacttcttcttgttaattgatttatctgttgatggagctgatcattactaatatgcctataagcatctagaaaactgtacggttctctctttgattcctataggcatatttctaatggaaaccagtaataaaattcttttctctaaagaatccattgaattgctctaattttttcttttgttcatgtttgaggactttttgagaaattttaactaattataaaacaaagtagagaagccatccaattaacaaatttcattgtagagcaatatttttgaaaagccaggcttttatttactctaaccctcaaagctctacagtacagaagtacctggaagaaagatacacagggaggtgtgggctaaattccaaatgctgtggggagttttccaatcttattaatgtgtaacaactaactggaatccaggagtgagttgcacaattgctatctagccccactagatcccccaaactgttaagtcattctctcctgtcttttcacacaaataatgtgatagtaatcactattatttatttagggtttgctgtgtgctaagggctgtgttaagaactgcatgtatattaactaatttaatctcaaacaaccatttgaaataggtgttattactgacactattttacaggtgagaaacatgaagcattgaaaaattagataccatgcccaaggatatagagttgataagttgaaggactcaaattcgaaccttaagattcagtttcaaagactggtttcttaaattctaccccaacagttacctccaaattgcatttgtatgcagctttgggactttcaaaaatcaatgaaatatttataaatgtattcatcccctaccccattcctcagaaatttctagaaacaatattgcatgtaaatcttaaaatagtcctgtgggatagatgttgttatttcttagcatagtcaagaacctgaatgatttagcaagttacctagtcaaaaagcaacagagtcagaactcaagtcctgactttctgaccccaagttcaaggtggctctgctgaactgcagcttcttcaagtcacctctatcaggagcacaaattcctgaccctgtgaagacagaccgattagggttgcagtctaggctacatgaattaccaattctggatcctcagctattaatttaaactcactaaacctcagttttcttatctgtaaaattgagattaaaaaaacaaacaacaacaaaaaaaacttaccccaggaaagttgctgtgaactttaaataagttgactttaaggctagggtattgtcacttacaaaaaaaagtaaaatttaatatataaatacatagaaggtgttcagtatccagcattcctgcaaaatgaaaatcaaataaagtcactctcctactgcaaaccctacttcccccattccataagatgcaaactcctctctagttccatgaggactttcgtggtctcatttttgtccaattctgtcctcatcccattgctttccggcccttactcactaaggtcagccacactggccttcttgaggatctagccttaaggcctttgcacatgcttttcttttccatagaatgctcttccctcagatcttcatctggtactttctgccaattgtttcccagcttgatggtcatctgttgagagaacctcctggataagccaaccattttctgctctatcaccttatgtatatcaccctacaatctcatcatttcctttctagcatatatcctaacctgtttattttatttgtgtttttattgattgcctctcctcaccaggatgttaatgccagccttgttcactgttgtatccccagctcatagaacagcatctggcatatagaaatggctcagtcaatatgtgttgaattcatggatgataaatggtcttacctaatttactatccttcacggagatgttaatcacaattggtgattgtgatcttagcttcttctagcaacttattgtggataaagtatatattttaatgctatatccattagggtatagttattattgcagagaacataatggaatttcaatgcatttacacatgtttgaacaggatgaaatatatgagtagtacttgcttctgtgtaatatgcaatattgctgaaagcatgataagtggcacgagagatggatgtcacgttgtttgtgatagtttcccctgtctcacttttaggctaccctccacagaaaaagccagtccacgcagggctctatgaaaagcccaggacagcaacccacccatgtggaaggtgtgtacaggccttcttttaatggccttatgtaggaagatgtaaagagtttgggcttttatgtcacatatctgtattggaaagccagccttaccacttaccaagttgcataaatttctgtgttcctcagttttctcatgtgtaaagtggggataataataccaaccatataggattgtcgagaggaaaaatgcaaaattagtacatagaatacacttacaaaagtgtaagtgctcaataaaccccaaaactacttttacatatcctccatgagagtcggatgggggtgggttcctgtttcctcttagggagagcagatataagaaaaaaaaaaaagtatgtgataactccaaattttgattatttagttttattgttaaaagtgaatcagggttgggaggccaaggcgggcggatcacgaggtcaggagatcgagaccatcctggctaagatggtgaaacaccgtctctactaaaaatacaaaaaaattagccgggcggggtggcgtgcgcctgtagtcccaggctactcgggaggctgaggcaggagaatagtgtgaacctgggaggcggagcttgcagtcagccgagatcacgccactgcactccagcctgggcaacagagagagagagactctgtctcaaaaaaaaaaaaaaaaaaaatcagggcaaatttcagtatttcacagtgttaggtcagtttttccttcttcaggtattagaggagaaccatattcacaagtattaaatggctccaaagagcaaggcggtatgagaagcagtagcgacaagacacccaattctagcatgggaaatgtcttgttatttttccagtagcttcacgtctctgaacttcaaaagtgctcatggaaagcaagacaatgtcctgctgtaccctcttcccctgggtcccagaattcaattaaaatcacgttctatcttgcctaatccaaagtgttttagatgaagggaacctggaaaacgggactatatctgtaaaagtgtgactgtattgtatccagcaaggttctatgcagatagagatgctggaaaacatccatttgatggtgaaagaaaatcagatagatagacagttaaataaatagctcctagagcttttcagcacattattccttcataactggagcctgcagggctactcatgaaataaaacaatcttgtaatcatgtaatttcaaattcattgcattgtcttttttgccaacattctttaaccgcgattccagcaaagaagatttcagcatattgctattcaaacatattcaaaacctatgacaagctaccctttaagaaggcattagcgtgagtgccatgggaaaatgtactccaaggttgtagatgaattgatatgatctccttgattgtatctttttatttatgaggcataatttctgagcactggaaagcaaactgcaatgagtgatgactaacaacaaccaaagtcataaatcagcagcagtgaaagaagtagtgattttgatcgaatctattgaattagctgttggccttagccaatacaggtattggaaagacctttttaatatctatttgtccccctcatgggaatgtgataacaatctcattacatgcccctaggaaacaaataatttaattgtttgcccgttaacatacaacctgtttacttattaattactggcatagctgttcatgctagattttttgtttatttctgatgtgaattgttacaaaattatgttcacattccttagtttttataaacaattatgtctccttagagcttcttgatataaatttgtcctcagaattgttgaaatgctttttttaatcaaatattgtcattatcccacaaggaagtatgttacagagtttcacagaagttgcagagagctcagatattcttccctctcttaatctctgacagttaacacttttactaatacaactcttgtaataagcagcctggataaagaacaaaaatctcaaattgctccaagcgtaaagacagtcatcatcacttacattaggagttaacagattagagatcttttgtaaaagattaatcggctgaatttggttactcctgtattacaattttatgaggagaataatagcaaatgtaagaccaaatagacatcagcttggtgctgacccatatacaaaccatccataaaccatatattatgaagtatgttcccttgatttgaacaagacttgtagcattgccttggccaaaagaatcataaaatattttcacaatttaggggtttttcttatgataccataaaggaaaaatgcatcaggaacccccttgaaatgtacattaataacttagctttgctgtaagacaatacttggaaaacatcagtcctaaggaaggttatttcagaaagatatgagacattgagcgaggcaaagcattaaggtgaaaactactttgtttagccaatacaggcattagaaagacctttttaatatctatttgtcccccttatgggaatgtgataacaatcttaacaagttaagtgtggaaattgtgctaaaaaataactagcacaggccgggcgcggtggcttacgcctataatcccagcactttgtgaggcggaggtgggcagatcactaggtcaggagtttgagaccagcctggacaacatggtgaaaccccatctctactaaactacaaaaaattagccaggtgtggtggcaggcacctgtagtcccagctactcaggaggctaaggcaggggaatcacttgaacccaggaggtggagatcgcagtgagtcgagatcgcgccactccattccagcgttggtgaaagagcgagactctgtctcaaagaaaaaaaaaaaaaaaaaaaaaaaagaataactagcacagtaacagaagcatccaaagggtcaccattcttggagatttctgatacatttccccttctcccatcctgtgcagactgatggtcccttctctttcccattcacaaaaattattacaatgcttctgttcacaaatgtttgcttttctcctagaataaaattaggaggagaaatgttgggttgagagaaattgggagcatttagaataatgttactctgcactgagagaaaaatagactcagcaatttctagaaatatcaaggtttcaagaaattactccttaagtgaaaattaggaggcaagaagtggttctacaaagtcagtaaactctagttctgtttggaactgtgaaaaaacacagtaattaactctatgatgattattgaattgtgacatattccaagatacatttattgtgtttatttgaatgactaaagttaatgtgaagtataactctaaagagacataacaaatagaaattgaaaatgtacagtgcctatattctgtacctggctctataaagaataggcctttgtatttttcaaataatattgggtgtaaaaagcgcttggaaatatgttgaaagggcagagtccaaggtcttctcaccagaaattctgatacaggtacccaaaatcattttgatgaccatggctaaggaatatattgtgacaaagacttctcttaaaagaagatttctaagaggcaattttcaagagagaacaaatgattaaattcattgttttcacagcaatgtgattatggcagcttagtggcagatgttgacactccatgtaattaaaaatttttaaggcaaaatacaataattagtcctttggggtaggaaagagtaaataaaagaacaatttcatttttttaatgaacaacaagcataaatatggtaatagtctctagttagatttaaaaatatattacattgaaaacagaaattccattgaaaactgacatattaatctatcattttgctagttaattacagaatttgtggctaaacaattttagtttttatgcttattaaaagtagttaatctatgttttctatgacattttacattgtaactttcttcatggttacaacagaaaccttagagaaataaatcaacaagtcagtcagtcctaacttttcattattaacgactagggaagtttctgactctacaatcataactgtgtgtgcacccactcattcacatgtgaaagtgttcaccaaacccaaataataatgtatttcagcagcaactttaatcatctttaatcttttattataaaagaataaatatgttcagtctatgagaacacatggacacagggaggggaacatcagacacagggaggggaacatcacacaccagggcctgtaagagggtggaggctgggggagggatagcattaggagacatacctaatgtaaatgatgagttcatgggtgcagcaaaccaacatggcacatgtatacctatgtaacaaacctgcacgttgttcacgtgtacactagaacttaaagtacaataataaaaaaatatatatatgttcagtctaaacactgtaggaacaaaaatatcctgaataaatcaaagatgaagaacatcttggcttttttttctcttggccatagaatttataagccttacttgcttttcttccccaataataactcttccatttttctaggagaagcccacacactaaagaaagagaaaatacacaactgtttgttcacaagatattttatttattgatttttatatgggttcattgcaactaaaagatcgggacatattgctaaaaagttttctatgtgggatctctgctgcttctttctctaccctataaagacagaatcgaatcttggggcattgtttctcagtgggaatcataagcataacctgttagtatttttaccctgaaccctgaactacacttcaatacttttatctcttgcttagccgggcatagacaaaaatccacagtgatattttagacaaagaacgtttttacctcagcagagacagagacaaagacagagagacagaaggagacagaaaaaatattattcacaggttcttttttccttttctcctagtggtttgatataacagagacactgcctcatcatacaagttttgtgaaattcataatgcttcattatctcagtcagctttctcttcattctgttttcattttcacagtagctcatgtaaataggttgatcctgctttgcataagcatgttgatttatatgaatgctattttgatctcaaattgattgaatactaaaaagaaagtctaggaaaaagagtaatgtattatgaaggactcctgccaaagacaaaatagcctgcatacattccctattagtgatggggaattttgaattgcctggttttcaaagagaatatttccaaggaaatatagcaaaacactataatactgaggcccaagtgtttttaaaatccagggattaaatcacattttggaactagaactccacctagtagaagttcacgtaacacaggaaggctgagatttagtacaatctacgacactaccattaaaaagccttaatagtatttatgattctatatctacattgaaaatgaaagaaaagttaatgttcataagccagagccagaactgtgctgagcacttgctatgaattatgcttatttcatctcattttctttcaacaccctatgcctgcactacttccatctcctattggtgcacagtaattaattggcaagttgttgaatttttcttttattatacctagttgcactttcttcctcattttcctccccatccattgtagcctgaatttaaattctgcctgcgctcaaatcaccaaccaaagttctgctcttggcaaaaaacgtcatatcaatatttgcaccttactttgcattcctttgtcaagaatattgttttaaatcttgtcattcattgtgtaataataggtgtcccccccaccacttcccagaaagatatttgcagtaaaagaggttgttctggggcacagtgaggagacaggaaccctcctcatcagccctgaagtctgacttcttcatgaataacctccacctcccctccctagtgtaagtctgacctcacctatttctgaggggactctgagagcagctgcagttgtattctgatggatggactctaacttccatgaaatctggctctcccattgctagctccttacttccctgtgcttaccaaaacaaacctccctcacctaagacaacttgtacatgtctatccatccttgcaagctaagacaccttaacctaatctagaattgcaggtattcgtctatggacaagtcgtttaattttcatgattctgactattttatttatgcatatggatggcatacagaatcaaaaaccctgctcattgaaacaggcactggagagcagaattcttgtttcagcacttgtaacttttgtcaccttgaacaagatagtgaaattttctgaggctcaatttcctcacctttaaaaggggactagtaatacattctcggctcaccttacaaggtttccattggaaggactaaataagctgacataagttaaagtgctttgtgaaatgtagagtttatacaaatgtgagtgattattatgcaaatgatgagaggatgtatccgagctctaaaaagagcaggtgtatctatgtaagtaggttagttgtctcttttaaaaaatgaggctcctggcaatcctatcagcaaggggctggagatttgcatttgacagcaacctgaaaacaattcaacatcagaaaatttactttcacaaaggaatccggaaaaaaagaaaagtatgaaaaccactgataggagttgacctaactactaaaaatctgtctaatgtttcttctcttgaagatattattgatgcaaaagcaaagtaaacaaaaatgaaactaaactctcactgcaaaatattctcataggttttttctttttttcccccacaaatatctcctattttgaacattctgcatgctttttttttttttcaatactgcatgcctggaatgtgtgtactgtagaatcaaacaagtttttcagatttgtctttaaaagctcgggggcaaatttttagaaaatatataatgtagaagaaacacaatgagaaaaaaatttcctgaagttaggctttcacatgaaagcttactaaggaatactactactcctaaacacgcagacagtcttcttgtattgccatttagatctatcattctgattgatcactgtgtagttggctattattgggcctaatttaaccctatacactcacacatccatctactctgtctattgtacctgacattctacaaattacttactcatgcaaatgacgacctaaggcaaccttttaggatattcgtgtttaattatacaaatggttcttgataaataagattatacatcgttccatatgtttattccctccttgatgaaaggaaatttaattttcatgcagatttggtggggacaatgtttaagaattgctgagttttttgtagtctgcagatccatccagtctgcagaagctgacaaaatcactccacttcccacacagagatgagcagttttttcattaggcttaaatcaacgtgctgcattctgaaatcctaaacggccccctttgtgttcacatggtcaaaggcaaaaggcaaaaaataaaaataaaaaaggaacagcctgctctccttgctctcctgtgtgattacaaggttgcaagatcaaagtttatctcttcctgttgtgtttagttgcttttggttgccaatttcgttttttttcctttcttttttttttttttttcccagccttagggtatcttgcttttgacagtcttgttgatttctctttggaggtctgggcagtgaattctgcaggaaaagcccccagtagctggacatggtgcagaaccgggccagccccaccagaaggtctcagagcccccacgttccatgtgatctcttctacccaagcagtggtcaacatcagtgcccctgggaagcccaacgggatcgtcagtctctacaggctgttctccagcagcgcccatggggctgagacagtggtgagcagcagagctaaaaatccaggactggttgacttttaaaaatcattactatgaaacctttgtttttatgtttttgtttttccctccatctttcttatccttctgttctcagttgctctacggtgaacttagtagcacaaatatccctcagagaagaaaaagtgaaccctgaggaaacatacagaaagtatgtaaactcttagggagagggatgctaaaggtggtattaaagactccacaaacgtaagaaactaagactttaaaggcaatcacactaatttaatttaatttaatttaattagaaaacagatcaaccacttagagtggtggcacatagtaagaagttggcaaatggtaattattggtggtgtaaatgttagtatgaaaacaaaatagagcaaagaatatccttggaatctctattttgacatgcacaaatctctaataatacatggaaaactctcattcctctggtgatttcaagaaagttctaaccctttagaagagagagcagagcagctccatcagcatagccctagctccactgtttgttcgttaacacgtttgaggcacactgggagacaggagagattgctcagggaaatcatctttcacattgtgcgttagccaagccacttcccggaagcgatgctaagaatcaactagaccagttcctgcattatttaaatgaagataccagcagccagcacgatgaagactcttgtctctgtggtatagcttgtgtcactctcaagtttctcatgaataagtggagattataatactttgttcacacaaacattgtatagagattgtgcagatcctggtattacactatgcattatttaggccaatttagggaacaatttgggcaagtgtggagaattcctctgagaccagagtgtcaggtattgaaacacaatttcaacagataacttacatacagggaggcttggattgaatgttaaaggaatattagcatattttctatagggcttcgtactcaataaatatagatgatgtaaatacaatcaacccttgattatccatgcttataaaatgataataaactaaaataatttatatttggagggcattgtatgcattttttaacagctcttcttaatcatatgttctttatgtcaacatgaacattaatttcagtttctgaactcttgttccgaagagtacttattaaaaccacaatgaggttaaaaatttgctcaaaataaaccaaaactttataatcctacaaagatgattgagagaagactatgatattttgtaaaaaccaacaccctcagaggaagagatagactttcaagccctccaatacttatacctgattttaatgtagatctgaaaagattttttgactgagaaattgcatgcaagtaaccatggcagaatatggaccttggtgaatgctgactagacatataattggaaggcagattttgttttttgaaaagacatcactctgagggtcatagactttgatcaacactttgtgtgttccgtgccattttctaatacctttctaaggtaatagataatcgataatattatgccttgtgatttccatcctgctacctcaaacgtctatttaacggttacattatcagatttttcacctatttgtcatacctctctaactgagttggtaattttttgaggataaatgtcatgctaaatgccatgttgtgtctcccagagtgcctggcatggtactccatttgtaggaggtgggatcttggataacattcatcaaacacctttaatgtttgacactgcctttatctagccttccttccttccacagctatccgaaggcatggccacccagcagactctccatggccttcaagccttcactaactactctattggagtagaggcctgcacctgcttcaactgttgcagcaaaggaccgacagctgaactgagaacccatcctgccccaccctcaggactgtcctctccacaaatcgggacgctggcctcaaggacggcctccttccggtggagtccccccatgttccccaatggtgtcattcacaggtaatgggtcaggcagaaggatgaagaaactaacaaggcatgtgtacagacatatgaactcatggtatagcctactctgcacctaggctacaaacctgtatagctacctggcactccccagggaggacttgcttattgaacagatatctatagcaaagtagacaaacaaattgatttgagtggtaatgttacctgcgatgtatttaaatcataaaagcaactaatgatagaaaggagaacaacgaaatgttttacattaaaaagacaatgcaatgtgttcgtattcaatatgctcttcctaatggttatctggaagcattccttctaccagccttcactggaacataagatacctccacagttaaatcagaattgccctgatctaatttaaaatattgtcataaaccactgtttgaaaggaaaaagaagacacttgactcaaaatcatttagaaaaaaaattatttactctaaaaagagaagaaccatttatgtctctcctcttaaaagagggaaatgtcttatctctaccaaaaaggatcactagttgctgggtaaacagcaatgtgtgtgtagatggtgacttctcttatcatttctctggttacatctgctgctcgtttccaatagcattacataaggtgtttctgagagcagtttcctgcaaatggaaattttaaagagcctgtagctctgtgaaaacaaaatgtctcctcacaaaatagaactggttttaaaagagagagttaaactaattccattacccgtcttgactctacgtatccattctcattttagctatgaactccaattccacgtggcttgccctcctgactcagccctcccctgtactcccagccaaatagaaacaaagtacacggggctggggcagaaagccagccttgggggtctccagccctacaccacatacaagctgagagtggtggcacacaacgaggtgggcagtacggcttccgagtggatcagtttcaccacccaaaaagaatgtgagtataagtggctgctaccataagccagagagattggaatgtggtcaggagaagcttgccctgaaactcggagaagccacttttaaaaacagattgagtgggctcaataacactgaatgttactgaagcattgatgaggatgactactgaggaaaaatgcctactggatttaataatatggaagtcaagggaaaatttaagaaggattttcttgtggggatagggtaaaaataaatttaggggaagttaaacgatcaatgggaagaaagaaaatgaacaaacactggtagaccatttttataagaagttttgctactccttttctttgtaaattacatggcataatctctagtatgtccagagagcattgagacatagcactattaggaaaagcaaaagggcaagtgagtgaaggaaagagcaatcaactaattaattgggggcttccttacatttttatataatacagtcacgcatcgcttaacgatggaaatatgttctgagaaatgcatcgttaggcgagtgtcgtgaaaatatcatagaatgtacttgcacagacctacatgttataacctactctgccccataggcatgtgactgtgctgaatactgcaggcaattgtaacacaatggttatttgtgtatctaaacatagaaaaggcacagaaaaaatctgatataaaagataagagggccaggcacagtggctcacgcctgtaatcccagcactttgggaggccaaggcgggtgaatcacctcaggtcaggagttcgagaccagcctgaccaacatggtgaaaccccatctctactaaaaatacaaaaattagccaggcatggtgacacatacctgtaatcccagctactcaggaggcttaagcaggagaatcactttaacccaggaggcagaggttgtagtgagccgagatcacgccactgtactccagcctgggcaacagagcaagactccttctcaaaaaaaaacaaaaaatgtaagagatggtacagggcagctccattataatcttatggaaccaccatcatttctgcagtcttgctcaaaatgtcattatgagatatatgactataacttagattttataaggtatatgctttcattgtttaataatggcaaacacaaaaagtattaagaataataagtgcttatcagaaccaactgcataatttatggagtccagtggaaaatgaaaatatggaatcctttgctgaaaaatctttaagaattccaagacagtaacagtacagcatcaggctaagtccaagactcttctatgtcacaggcccttgcaacagcacaggtcacatgccaaggaagctggtccagcttattataccccaacccagaggcaaccactactaatattttggcataatcaattcttttaatctcctttctatgggtaatttttactatatggctgaaatactataactaaaatttcatagtcagctttttatacttgacgttattgtatttgcatttcccgtggcattaaaaaaactctttagccaccaattttaatggctatacaatattccatatataaattaattgggacattttgttttttttttaatttcccattaataaatatgatgaaaaaatctttgtgaacagatctttgaatgtctggttatcttcttaaattaaattttgacaaatagaatttgctattaatacatcaagtattttaatattttaaggctttggatactagtttcatgtttgctttcaagaaagattatgtcagattataaatcttacctaaaatactctatctggcattgaatatgatgccaattttaaaagcaagaattacgcattcataaagaccaatgtctcacacaaggagcttaatgtgtctgagcaacaacatggtaggatgttagtaacagatcacatttacagaggacttgtttgttcctggcagtattttagcattttacaaataattcttacaacagacctattattatccaaatttacagatgaaaaaactgaggcagaactataaactgtgtactgcgattccaggatgccattcatatagactatgatctgaactgaggctcttggagttagacagtgacgtggccctaaactaaggccagagcttaagtaacctggccagtttccacatctagtaagtgcagtaattactctgaactcatggtcactgagctcagctgctgtctcagtactactctttccctgatcaattcatttcctactctctgtaatcaagacttcaaaccatctccaccttcgccaaacctccctctgccgctcaccctttctcccttcatgcccacaacccagctcacccatttctccctttattctctgcagaactccttgtcttgtaattttccaggaaaagagatgtcttcagtcagtaatttgctccacttcccactgcagacaaagctacctgcatataccccattgctgtcagtgacaaggaaagggtggtccttcttccgtctgaaataaacctgccttccatgcagtgaacttcatccacttcattactcaccatcccttctctctccttaatctttctgtgtatctcactttgattcaaagttccttctacccttctaatgttaaagcaaacaagctcctcttcccctgcagtgatgtggactctactctctctgacagcaaaactttcctgaggaacggtctgcagatgctttgcccatatcctctcttccacttactctttaacttcctcagcactggatgaaaatccctttctaagtttgcctttggcctccatactgatatatccagaaggcatgtttctccaggagtcaccttcactgactttccagtagcattcaacgcaactgaactttcaatgttcaatccttttttaaaaagtggtttaccctcattttcattaccaccctctcctggtttctcctctacttctttggattttcatttttagtcaactttgttggttgatcttcttccgctgcccaaatcttaatcctaaacattttaactttgtccccttgccgtttctctactccctcctttcctcctccctcatcaggtgagttcatctgctccaaggctttggttccaaaagccaaactccagtggtcacctcctagtcaagtgctctgttttgaagtgtatacccctccacccagattcctcacagacatctccctctgaatttctcataaccagcttacattggacaggccccagacagagcttgcaactttccccttcaagctatgcttcctttagtcctcactttctccattttcatctccagcactgggcacagtatcttagattccaatcaatgttgtttaatgaataagcgagtgcacctaacactgcatgtttattgttgacactgctcaatcagcattttttgtcacccatactatattcaaagcaaactgtaatgattcttaatgtgtgctgtctgattttgtaatctcctttgcactacatccagaagccaattttgctaaatgttgcagttttttggttgatgtggccagaaagccagagaacagctaggtgagctttgtaatttataaccaattcccttttgagtcatgaagcttagcttttgccagaattttttttttcttatgcttggaagaacaaagtgaactgatttaagattttcttcctgtggccaggcacactggctcacacttgtaatcccagcgctttgggaagccaatgggggaggattgcttgaggctaagagttcacgaccagcctgggcaacatatcaagacacctatctctacaaaaattttttttttaaatagccaggtatggtgacatgcgcctgtagtcccagctactcagaagactgaggcaggaggattgcttgagtcctggaagtcaaggctgcagtgagctgtgatcatgtcactgcactccaaccttggcaacagagcaagacttggtctttaagaaaaaaaaaaaaaggattttatctatttgtgtttttttatattggagaagcagcttaaacctggactagcaccataggagaagaggttcccttaatccactactgggtcaatagttacggaaaaatacaagaaatgactatgatacaggttctaaaataccacttatgctacttttaactcattataaatactgggagcacgaaaacatgcaccagagaatacaaaccagaaaataatttggggcctggtgtggtgtctcacgcctgtaatctcagcactttgggaggcagaggtgggcagatcacttgacgtcaggagtttgagacgagcctggccagcatggtgaaaccccatctctactaaaaatccaaaaaaattagctgagtgtggtggcacacacctgtaatctcagctacttgggaggccgagtagtgagaatcacttgaacctgggaggcggaggttgcagtgagccgagatagcgccactgcactctagcctgggcaacagagcaagagtccaactcaaaatagtaaccataataatttaaaaatagaatatgcagttttatatagatgtgatcacatgtacactcagcaacgggtctggagaagaagcctaacaacacatttagttccctctgcttgaatcccccttcagtggagagagaggtgaggtgtaaatgtttaacagctggcctgcttgagggaaaaatggcctgatttgaagtgcttatcagtttccatggtgtgaatacccccattactgctctcaagtgaccaacatgacagcactgaacagagttaggaagggatgggttgtagcgtatcattatataatatttccaccagccagatagagtggatgtaaatgacctcgagcacacagacggtagtaaaatgtagtgaaacaaataaaaagttatgaatttggagtatttataagctttgttttaatataatttatttaagtttatataatttaatttttagtagtggccggatttaacaatgactcacaaaattcctgaatatttaacagttggggtgagccaacttcagcacaccactggagagcacccatagggtgaattggtaaattctgttcttttcaacaaatgtgtaccgatgataacaaagtagcatgggccttatttaagcaagcctaggttcagctccttggtctcctaccagccactgacatagagcaagatatttgacctctctgaacctgagttttctcaccccaaaaattaggaatcaatctttacaggattattttgaggattaaatgagataaagtatgtcaaaagctaggagcgtagtggtacttacagctttttcagtcttccttggggaggatttgtaaactcattattctcgattattttaattgcttactctttttcctcaggaaggtctccaaaccctacaggacaaataagactcctatctttctattttcttgctagttacaagctgtttctttatctgtgctgttatgatatagggaaaaagtgaaaatctactgaactaaggtgatggagagaagtcatagacaaataacaatagagtattccttgtgatatcaggcagaatcaatgttggaaaagcattgagatttaaagagggcttgataactcttgttttggtgtttgcagaaaatttttcttatggctttatgaaaatatcttattttgaaagataacaatcaactgtgtctttacggttgaatattacaattacaaaagcataattattccttattttgttatatttcctaacatcagaaatagatggattgatttttaaagaaaaagaatcagattcaatttagtctcactactcactcctttcttttcttaaaagccaatttggtatataggtgaatcttaatgtttttacaaatatattgattattttgtagaaaataagatctcatgaaataaatctcttctgacttgacaagatgacatggtatcccttcatttgtttccacaaaaattattcatttaaaaggtgagccccagttaaggattttctttttgttttagtaaggaactgaaaaatcaagagaatgtgcctgtgaaatgcacacaaagttgcttctatatgtgatataatacttaggacacctgagcttgattatatactaatgtactatgctattgattgattagtcagggccatgaattattatacttgaattactgtttgcaaggctttttaactatcttagaaaacaaactaacagtttgagaaaaagctttaacaataaatgggtgccaaaaggacgtaattcaccatctaagcagtttggtttggagaaaaaaatatattaacttcatctagtccttggggctttgtggcaataaatattgatttgatatgaaaaatagctatctactgtacttaatagtattaaggatactttacctgttaaaaagagggaaaatgcaacaaaatatgagctccagggttatgctggtgagcagatccattgtatgttaatagttttatttataaaacaccactctctatcgattttttttaaagcaggcataaagttgctgagaaagcatttcacacatgttcccattggttttcttttcacccctgatactggttgtttcgtaatactgaggaaaaagtgaaggattctagcaatgttggttttcttttttttttttttttttgtttggattggttcggtttgattttgctcatattttttttttttaaagtgcacacctgcactccttcaaagaggttaccctttttagaacatacaactttctccccacagtgcctcagtaccgagccccattttcggtggacagcaatttgtctgtggtgtgtgtgaactggagtgacaccttcctcctgaacggccaactgaaggagtacgtgttaaccgacggagggcgacgcgtgtacagcggcttggacaccaccctctacataccgagaacggcggacaaaagttagtttctgactcctgtttctcagtgtggaaggcgctctgttccccagctttacgggatgctaaatctgaaagctgaccagcagatgctcaccattaaaatgtcttggtttaagtgcccccttcttgtgaaaaagttactgctcaggataaataaggttttctttccttcccatttgcagcttgacagcactgcagttataatgcagttcaaggggacagcgctgcctccacaggactggagggtccccaggaagggataagacccaagggccagttgggttcacaaaagaaatagcacccatacatagtcaatgactaccctaaaataatacacttctagcaacttcatagattttcttgctgtatctccagtctccaaacagagccctatcaggaaataactatctccaactcatgaggacctgaataaggggtttccttaaccttccttgatatcagcccctgaaagaacaatcttgaccctctaaaatggagttccttcttcctgtttacttacatgtcccttttctccttgccttgtttttaaattgaaatgagaaaatgctttacaaggtgctaagtattttatagtgatcagcatgctcacaggaccaatgttcactatataatgaattgattaatgagtattttattttggctgtaaggtagaggtaaacagtgagctccagcattgcatgtatagtaatagaaacttaataacatttttacaaagattcagctacacatgttcattgttacagttcatggtcacctgggcagctctttgggaaaggaaggtggcctgatggttgggagacacaggttctacctggccaggcctataaccatctgtgtgaccttgcaagggtcacttccctcaggttcctggccattggaagagcaatttagaccatgtgatttctaggatcccttttgagctctcctgttcagtaagaaactctaggtcatttagtggaaagtacacctgtaaattttaaaggaaggatttaaaccgtgtgcagaacaagatgcgctttgtgtattaccctttactcgtctgatgttcttttcctttgctgtataagctctaattttccttagctctattacttatggataggctattattacactaatgatagctttttttcttaaacattttaaaattagaagtaattttgaatattatataaaacgtcataacttgctttggaatcctatttttcatgctatgatgcattgctcttttaaaagcatgtgccctatttgtaggtgttgaatgaacaagtcatttaccagttcttccttttgtctagccttctttttccaggtcatctgcacgactgacgaaggaagtgttaagacgccgttgatccaatatgatacctctactggacttggtaaacaactcatattatacttggcgtagcacctattcatcttcctcaagaaacacacatatgtttgtttatacatacttggagtcctaatatattagcatagactatacagaagaaattgtgccaagtgttgtcagagtttttttttttgttttttttttgttgttgtttttttttgagacggagtcttgctctgtcactcaggctggagtgcagtggtgcaatcttggctcactgaaacctccacctcctgggttcaagcgattctcctgcctcagcctcccgagtagctgggattacaggcacgggccaccacacctggctaactttttgtatttttagtagagacatggtttcaccttgttagccaggctggtctggatctcctgacctcgtgatctgcctgccttggcctcccaaagtgctaggattacaggcatgagccactgtgcccagccagaaattttttaaaaagtcctcatggaacttatatcaggcaaggagttacaatacactctttttttttttttttttttgagacagagtcttactctgttgcccaggctggagtgcagtggtgcaatctcagctcactgcagcctctagctccaggttcaagcgattctcctgcctcagcctcctgagtagctgggactacaagtgtatgtcaccacgcctggctgattcttgtatttacagtagagatggggtttcactttgttggccagggaggtctcgaactcctgaccacaggtgatccacccaccttggcctcccaaagtgttggaattacaggcgtgagccactgcacctggccagaatgtactcttaaaatgccaaatattgaattgtaaatatggaaaagaccagagagctcaaactaaatttttctcctaaccacaaaccctgtcaataaagaattgtatgacttcgcgtgcataaaggtgatttacagaggaagttagaggagagatcagaagaagaaagaaaatattcagccaattcatgttgatcataatgttaatattctagattcaaagcctagaatgataaatttggaaagtgtcttttattctccataaaagattatgattgactgttgatatcgggtaatttagctcaacgggtacaattttaatttttaaggagcatcttttaaactgagttttactcatagtctctgaatctaaatttgtgatactttataaaagcaaattagagaaatgccaaatcttttccactaaaacagattcgggattgatatcctattttaaattccagtaattaatgatatatcaaatttgcatgtatagagtttttttttgaaaaataaacatgtccaaaatttctgaaacacaatttaaaaaaaaaattttttttaatttttttgagacagagtctcatacatgatgaaacatgtatattattgtcaaggatagtttcaatttgtaaaaataacgtattattctatgtttccaaactttacatgtctggatgtcatataaaatttcctacaacacttaattcttctcatacggcttatttcatttaatagcagtggtaggatagaacagatctcatttagtattctgttagcaactccaatatttccccaagtggacaagtggaggtataagggacacaggaatttatccaggaatgctctgctagcttgttactgggatgagaacaccaacacagattttctattgacttctggcctgggactttttctttgcaatggtttgccaagttaagtacgcataggaatcacctcatgtgcttgtttattgtagtttcccgggcctctggcagagattcagactcaaggaggctcagaatctgctctttaaataagtcctgtccagtgattctgacacagggctcagaaccacgtgttgagtgatgccggaaaaccaaggttgctcgccttctaagccctgccagtctagtttccttggtgaatgggaagtgtgttgttcctggaggcaggccatcaacagagacggatttactctgacactggctgtggtttcggttttctttggatctgaggcccagccaccagagtttcaaaccctgacagtgaacctcccatgtgatgcacaggtagagtcccttaaggtgaaggggtacttcaaaaagacagaagggaagggataaagggacaccatcctgatctcgaggtcttcataaaaaggagaaatcccccgttggctcatgaatacgaattgaggtttccactgtgtctggaggccgggctttgggtagagcagaggggaagaactctgaggattgtgcaatgctctggcagattccaagatgtgctgcccaactaatatccatcgtcagttctaattttcatgatgtaacttttttaaaaacattcctgttcccttgcctgaaggcagcctccaagcaggagagtggcagagacctcattttcctctgactgttctaagggctatttcccttttgaggcttccctcgggcaggctgccctcccttcccctgcgtgctgtggagcaaggggcccactgggcccatcagatcagtttctggagttacagccaacaagttgttttctctctgtgccacacacagaggaaacaactcttttagtgtgcaacctaggctggtttgtttttaatcaaacaacacacattggttcctaattaggggaatttcgacctgctggagcttgattggagtgttgactcaaccctttattttagagatgagaagcaaaggtcagagtccaacatttaatcacagagctgatcggcagcagagttagggttggcaaagtaatatccctcctcttacggagttcaaagtttagttttagtcaccatctgttcctgcctttaatagtttcaccccagttctgaacttttttcctttaagtctttccctgctagtgtgagtgtgaagtaccacgcaggcccatggagttctagaggtgttgaaaagggggagatttgtccagtgagtgagtgggctttgcagttgtgtctgcttgttcttctgacctggctgtgggtattagatttagatgagcagctctctggctcacatctccacaccagcctgtgtggccgctgcatcagatccacaggtttctgtgctggccccagcagtggctggatgggagcagatctctggccaccccacccccacccctgccgcacccctgcttagcttgccaagctgacaacataatttcactgccttcgcctatcctgcatgattcttgtcagcctctctcctatcttccccacaagacttaataaacctgcctggctgggtgcggcggctcatgcctgtaatcccagcatgttggaaggccgaggcaggcggatcatgaggtcgtgagattgagaccatcctggccaacatggtgaaaccccatctctactaaaaatacaaaaattagccaggcatagtggcgcacacctgtaatcccagctacttgggaggctgaggcaggagaatcacttgaacccaagaggcagaggttgcagtgagcggagatcacaccactgcactccaacctgggtgacagagcaagactccatctcaaaaaataaataaataaataaataaataaataaataaataaaaataatcctacccacccttcatccctgtaaagctctaagcataggacctggcaccaggtacattcttgttaaatgtgagctacttttattaatactaacttcatgtgcagagactcacaccaactgaactctcaatgtgtgaacgccaagcaaaggtaagtggctccagtgctaaaagatttctttccataggaagctttcccagtgcatttgggtgatggtttgctgagctttgctctttaacagagaggccatgtaaagacaacatggtagcaaacacaggctgttaatatcataatggaaaatggaatctgatgcttcaaaatccagtttgcacgaagtatcaggaattggactgttgcatgaagcaagtacacctcagatctccaaggagtgattttgtttgtgactctgcagcaataatagtaagggtcccagtccctcatgagaatccaagcaaggactttgctcccaagacacacagctatgaaacaggtgaccctcaaggttactttggtaacctcttttaaaaattgctccccacactcccatctttcccagggatttgtcaagacagtggtgatttccaacctgagcagcagcgccagaagtgtcagcaaggcctctcaagggctgtaagcatctcgttataacccagcaacctgctgaaccattaccccaggctgcacacaagtgcaaacaagcagtaagagacaaactgctttctgctttcaactcctctctaatttactatcaaatagcagggccagagatgacaaaaatgctttctgaaataacatttcccctttctttctctgggttttgcaggcttggtcctaacaactcctgggaaaaagaagggatcgcggagcaaaagcacagagttctacagcgagctgtggttcatagtgttaatggcgatgctgggcttgatcttgttggccatttttctgtccctgatactacaaagaaaaatccacaaagagccatatatcagagaaagacctcccttggtacctcttcagaagaggatgtctccattgaatgtttacccaccgggggaaaaccatatggtatgtttgtagaggtgtggccccatttccctatcactggactagaatacttgttttccttctgagaaaaatgtgtcatagccatggtaacaaggaattagatgtaagttatgtttcactaagtgtggggaccaagagaggctaaccctagaacagctttctcaactttggctgcacattagaatcacctggaaagctttaaaaaatatcactgcctggacttcatccgagaaattctcatatccttggtcttgagtagggcctgaagattggtattcttttcttcactccaaaactgattttaatgtgtaactagggatgagtatctctgccctgtaattgtaagccagggcctggtggagaagagttgtatgttgagattacctggggaaattataggttgtattactgtgtaatttggtggcggggaatgaacattaaaaggcggagatggggaggaaggggctacagtgctagtggtgctcggtctgtcctctggtcctgacaccctgtgccacagaggatggatggctcctcttagctatagaccactcactcccaaaataggaggtccagtaaaggtctagtgggagagggccccatcacttggtattacaggacagtcattgcccagagcactcattgaagggtaaaaggtgatttaattccatggtgcagtctggtgtggggctatgtctacctggaggaggaaaggctgcgttttctaatcctcatcaggtacccatctgttcaccaaagctgggcgcccacagggctacgtctccctgaggaggtgccttttttccagtttgcactaaggttctatattagctagtggctaccctaggcagtactaaaattaagcacagaagcctggtcaagctgcttacacttcaacatttaaaaaaacagcagtgagtgaacacagcagcaccatctgccttccagatctcttcacttttccagcactcagcaatgaatgaccactggttaagccccaacatagctggatcagacctaagtagcaggagtgttgggagcacaaaagggcagtgggccctccgaggtccacggtttgtggtttttgtgggaagtagcaatgggacaatgacgtggtggtggagaagcaaagaaggcactgcccaacaccatcagggccttggctctctactcacatctgtcccactcctctactcactcatcctcctcggagcctccttcctccctgagcccatcagacaagctctaaccacagggccattactgctgctgctccttgggtggctcacactcttgcttcattcacatctctgcacaaatgtcacctcccattctatgtaaaatttcctagccccttaacccacttcttttcttttctatagcatttaccacataacactaagtcagatatgtttgtctgactcctgaaatagaaggtaagctcccaggatcaatgatcttgtgggcctcttcctgttgtatgtgccccgggacccagaacggtgcctggcatatcataggcactccacgaatgtttgttgaatgaatgaatgtcgagtgatcacttcgaaccatgggctgtttgctcctgttcagtgaatagtcattaggagattctcactgaagagcagatatttcaaaatttttccttgttaaagaataactttctttaaggagcccatgttcctagaaggtgcactgctgctggaggaaggcagtggaagagagaaaagaaggcaggagagatctgtttagcctgggagatgagctaaactgaaactagggtctatggagtgcatggagtggtgaaagggaggttcccaagcactgctaggcacatctactgtataatgtgaggtgcggttacaggaaagtgtacccacataccagcaatgtccagaagtcatttcagtgatactttctcctgtcctttgacccagtccctataggcaggcacctctgtgtcagaatcctccatgaggaagaacactgtcttccttacttggttaacttagtgaccagaagacactcccatcattcttgtggagatgttatgttactctggatataaccccattgctcagggttttaatgagtcttgttaagcttcgttttgtcaaagtgaggaccatgaactatctgcatcagcatcacataggaggagcaggacctgaagttctgagggagaaactcaataatctgccattttaaccagaacctcaagaagtctgggccaggctcggtggctcacacctgtaatcccagcactttgggaggttgaggcaggagaatggtgtgaacccaggaggcagagcttgcagtgaaccgagatcacgccactgtactccagcctggacaacagagcgagactccgtcacaaaacaaaacaaaacaaaacaaaacaaaaaaagaagtctgatgcacagcaagatttgagaacagctgaaaatgaaataataatataatacaaaacctgtatgcagtgtactgtttgataaccagtagaaacaggtggtgggagggtgctggttagaccttgctgtcctgacaccacacaggctaagccgcctctggggacagacttaggcttcagctgagaaaagcggacaaaagaatgtaaacaccctgttcctgcacaccctttaccatcggggaaatgcacagtggcacccaactgattctttcactgagtggccaagactgagtcaggtgtgaggatgggaaggcatagagggactggctggctgccaggggctctgggcccagggaactggctcatcctcagcagggaagccattcattgcaggcaggtctcagcagaagtgaaatctgggatacaccagggcaccgggtggaattcccctgagcctgttgaatcataatttaatcctatccagttgacagtgtatttgcaagtcttcttctgttgctttttacaaatatttttaaaccaaactgctctcacaaagttggagaccatgagagacattgtcaaaaattagccaaactaaagagagtacaatttgtattagtagagcaaaatgaagtccctgttggtgactgtgggctcctcatctactcaggtgggaaagaatccagtcaaggggaagaatctgaataggaacaagccagattcacctgctcagttttccagattgactgtcttttcacttgagtaggtcaatgagctatgcccctgcaacacccacccacacacacacacacacacacttctccccctcatgtgacaagctctggtttcagtgctgctgtgaccctcttccaagcacccgtcttgtgaacaggtaagataccctttgaacatcagacccaaactggcaaaaggattttaggctatactctgaatggagagaaataggcagaggtgccaaggaatgagagtgtcttttgtatttcatcaacatttttcaagaccatacagtatacagtatagctaagtttaagttttgcttgttatttaattactggtttgaagatcctttcattccctgcaatactaaacaaatactggcagtggtacttaccttagacactaatcaattaatttccactcaccaaggtttttttttttttaatttgtttgtttttgagacagagtcttctgtcatccagactggagtgcagtggcatgatctcgactcactgcaacctccagctcctgggttcaagcgattctcctgcctcagcctcctgagtaactgggactacaggcgcccgccaccatgcctggctaatttttgtatttttagtagagacggggtttcaccatgttggccaggttggtctcgaactcctgacctcaaatgatccacccgtcttggcctcccaaattgctgggattacaggcatgagccaccgcacccggcctcactatgaagttttagttgcaaaacccaactttctctctctcatatatatatatatatatatatatatatatatatatatatatatacacacacacatacacatacatatatattcacatatatatgtatatatacacacacacatatatatacacacacatatatacatatgcaggtatgtatcctaggatatatatgtacatcagagcagtattaaatatgggtatgataatgctgtcattggagaaatgcaaggaatgtgtttaaaactgttccaaacatggactgatgctgccatttgttctcagtttgactctgtggctgatatatctgatgtgtcaagcaatgtcaccctaaaaagttacaccatgcactttgaggtacctctgtgtgctgcatgaatgcatgatcttttgcatggtgtgttgactgcacagtgaaaagcaggaacagatcattgatgacttccatatatccattccttggaaagctgaacaacatgagtgaaaactctactgaaaaaagaaaagaaatgggaggccgaggcgggcggatcacaaggtcaggagatcgagaccatcctggctaacacggtgaaaccccgtctctactaaaaataccaaaaattagccgggcatggtggcgggcgcctgtagtcccagctactcgggaggctgaggcaggagaatggcgtgaacccgggaggcggagcttgcagtgagccgagattgcaccactgcactccagcctgggcgaaagagcaaaactctgtctcaaaaaaaaaaaaaaaaaaaagaaaagaaaagaaaaagcagaaacatttcattgattggaccagctaaatcagagccctcagatatttagagcaactatagtttatcttacggcgcgttctaggtctaaattatgtagtgactttttctctctgatgttaatatcagacctgatgtaatttggaggctggaatcctataagaaatggaggaatatggaatgagaaatgagggagggaggagtcaatttccctacacaaatccaggacttttaaagtgaaagacaaacggagctcacatagtggaccaccatgaaataatattgttatctttggctgttctgggggaggagtgttctcaagagggaggctctgtgctgacatgtatgaagaagataccttgttcacccatcatccgtctgccttgccccaccactttgcaatgcagcaagcccttgccccacagggaacaacagccagagcaccagtgcatgagctctctaggtgccgaaaacactggccacctaacttgagtattagctcatcatctcatccttcttaccaagaaacccagggtcaccgtgttgtgggtgctcatagctgctaaattctgtaggtgacagttgttcccttcattgacaatgtgacaattgtcaggagacagtcattcccttcactgacaatgtgtgagacacaattctctgtcatatttcaagcccatattctttatatgtgaaatactcacagcaacttccttctcaggggttagccgataccaaaattccccggtctgggacacctgtgagtatccgcagcaaccggagtgcatgtgtcctgcgcatcccgagtcaaaaccaaaccagcctaacctactcccagggttctcttcaccgcagcgtcagccagctcatggacattcaagacaagaaagtcttgatggacaactcactgtgggaagccatcatgggccacaacagtggactggtgagttggtttcctcatacagggcctttgctaaatatcccagaaaaaatattggtacagagctgcctgtacttcaccgaatgctgccccatggcactcgcctctgagcacttagccagtgaggtagtaacaaccggtttactaatgttacttcagttgtttgataagcagggtagaaactttgtcttgttcttctggtatgcaatagatgcttaaaaataaatgcttattggctagccgtggtggctcatgcctgtaatcccagcacttggggaggccgaggtgggcggatcacctgaggacaggagtttgagaccagcctggccaacatggtgaaaccctgtctgtactaaaaatacaaaaattagccaggtgtggtggtgggcacctgtaatcccagctactaggggggctgaggcaggagaattgcttgaacccaggaggtggaggttgcagtgagccgagaccgcgccactgcactccagcctgggtgacagagactccatctcaaaataaataaataaataagcagcaaacaggttatacttcatatacttggagcagatgacaggaaacattggaatgggcctaaaacaaggcataaaatacaagcacttgttttactaaaacaaaaaggtactttttttgttttgccttttcctattggtgtatgggtagacgcaaaaagaatattttgtatcaacaggtgaacatggttgctttccaaaaccttaggaaatgatgacaaatgagggtgttactatttataagcttcatctttcataatttcagtccagtgggtacaaatcattggctctttgaaaggtaacctcttcgtgatataacatttattatcagtctctgagcggctacaataacaaaaatcctagaatttttgccaactatcaaatttcattgtgctaacttcctagatgcccgctgcagtacctaccattccactgggcctgttagaaaataaacagataggccaggcacagtggcttacgcctgtaatcccagcattttgggaggccgaggtgggcggatcacgaggtccagagttagatagagaccagcctgaccaacatggtgaaacctcgtctctaccaaaaatacaaaaattagctgggcgcggtggtgcgcacctgtaatcccagctactcaggaggctgaggcaggagaattgcttgaacctgggaggtggaagttgcagtgagctgagatggccccactgcactccagcctgggtgacagagcaagactctgaaaaaagaaaaaaaggaaaaaaggaaggaaggaaggaaggaaagaaggaaggaaggaaggaaagaaggaaggaaggaaggaaggaaggaaggaaggaaggaaggaaggaaggaaggaaggaaggaaggaaggaaggaaggaaggaaggaaggaaggaaggaaagaaggaagggagggagggagggagagaaagaaaagaaaagaaacataaccagctaggaagttagctcctgtgtttactcctctggggtaaaattattcacctccacttctttcaatcatctgcttctgtttttggatttgctctcatctttctcctccaagttctcacttttccttcactgaaaagttgatgacttccatgaagcctttcttgactaatagcaaataataaagggagttcgctggacccaggttccctaacactatataaaaaaatgtaccatccttctggcctgttcagaatgattgtataatatatacatatatataatatgcattttaaaatcacaggctgtttgatgttgttgtaacctcaactacatgagtccatttcagatctaaagtttttaaaaggcagggataattatatttggttgaaacaatgaattgctaactgatcatttttgacatgcaaaacagcaattgctatacattcaacataatacattgaaagttcagatgaattattacatctaatcttcacaaactgtaggaagtaggttctattatcatcctcattttttacaaaaagaactgaggtttagagagatgagtgatttaatgagagattacacagctagcaattatttttatgggtttgggttcttaaaaacatcatctgactacagagctcctatttgtaactattatactgtattgtcatttttgcttgctttttacggtactaataatgggcaatgtgcaaagggactcaataacaagcttttgaaggtgccagtacttggcaagttatctgtttattataacattataaccaacattactaaccctatttgataaatacaaaatacagcacaagagtgggaagaaatggagcacaaatagctagcattctgcctcttccatttaccgtttgaactaaatccatatatatgtgtgtatatatatgtatatatacagatcaccagaggtcaggagttcaagaccagactggccaacatggtgaaaccccatctctactaaaaatactatatacatacatacatacatacatatatatatatagtgtatatatacactaaaatatatagtatatatatgtagtgtctatatagtgtgtatatatatactaaaaatatatatatatacccccagctaatttatttttatcaagtatatatgtacacacacacacatcccactctacagatgagtagactgaggcttctgaggcttaggttaaaatatgacacaatataaccctcaaatcacatatacattttgaattagtctatagttcatgtgtgcatgtgatgtgatcctttcaataagagaaatttaaggcaaggtctgttttagaccccaccatggtgttgagaataaaaaagcctttaatacttattactttttacacttaattgatataactataaattgatagcaaatactattgatagcaagtatgtagccaatgatgattggcttatttttcagtatgtggatgaagaggacctgatgaacgccatcaaggatttcagctcagtgactaaggaacgcaccacattcacagacacccacctgtaaaggatggaaacccagaagacgtaaccctggaatgcaaggtctgcacccatttcctcctgggttatcactcacacatcataaatgctgaaaagccattgtttattatcctataattctttaaagaaatgatgactgtttttgaaagtgttccttcctaatagaggtctaagaaatgatatttttctcatcttaaatgagagagaatattcatatgaaaatacttgatttgctcttattttgtagaagacaaagaagtatgtaattgtcacttggttctgtttggcagtgatgctcctggttaactgaataatcagtggcaatttcaagatggctcacagttgttagaagtagtaagttagttactggctcaaaaatgattctgttgaaaggatgtcactgctgttcatttctatctgccatttctgtcagggttgacacaatcctgcaagaatagttattctaatgatcacagctgctaaatgaatcccaaactttgcaccaggtcgacaaacttttctgaaggttctatttatttaccatacatagggttacttaccaaactttttgacaaggctgaaggttctatttatttacaatacatagggttactcaccaaactttttgacaaggcaacacataacttacacataaatgtctctgttcttgcatttatgaattttccaaaaatctaaggagtaaacagcttatttatacattttgaggagaaaacaaagtgtttcactaggaacacctctacttgaaccaatgtttttatttcatatattttatagttttgaaactagtttctcataaaattctgtcaattcactgaatatcagagaatactgacatcttcaacctagcacatttcaaatggaaactactgttctatttgcaatattaggctgcgtgaaattttaaaaggaaaaatgtatctgttccttctagcattaacatatatacatgtagagacaagactatacctatgtgtatatatatgtatatcatgtatatattactctgcactatatcccttctttttggagaactagccattattttagccacagaatcagtaagaacagatgatatgcaacagtaccaattacggttcaaaaatgtctgtcacctgctctagttggattacaaagtcattggtgaaagtcctatggcaagaaaaattttcttgcaaatcatccacataaaatcagatatttaaatttgttcttcatggaaaacagagtaagaaaacctcttgtcttccttcatccttaaaggtctttgtgaccccaggaaaatattgactctgtctaacacacaatagtcacaatactttttgtgaatctacaaccagagacaggcaaaaacttgtaaagtaagggatagtcttacttattctgcctgaaaacaatgtattaccccagggcccaacagtaaaagattgtggactttttgggtattgagatttcatctagctctgtgagagagcagctcctcagactgaccaactcctagacaaagtttgccaaccataagtgtcaaaagcacaggccagtattaagcagaagttctaccaccttattagaactgctataaacaaaagcatctgaaataattgtgcacatctggcagtgactgtagaaaatacgaaatatatatttctcgccaagtttttatactttctgaaatgaaaacataggattgactagtttactggtttttattcccatatgccgattctgggacaataaagttgtttaaagctggcacaaataagcattaaccaaggctgtgtccaccttctgtgagctacttaaggtatataggaaaggagtggtcacaaacttgcatcctaatccttggtggactcttctaagaatacagtttgctagtcacaaagaatagtctacaaatatgctttgctaggttcagaagattgagtttatcctgatttttgaaaaattaaccaggtatctttatcactgtgtatttttccaagcacagtataaaattttaacaacgcacaaaaaaatacagaactgcaggggattttatcttggatcattatccatttaatcatctaattagacatgaactcagttagctgaatcatttacattttgactccatagcttagggcagacagaagcctgtatggcttctgcccagaactctgtcccctgctacatgtctaagtttacttgtatttatttcagagaagaactctaagatgttgctttgctactttaagtggtattgcgtgccaagcctctattatacaaaccatgcagactcgcctctagagattctgattcggttgatctggggtgtgtggctgaggcatcagtactttttaaagcttccaggtgttctaatgttgagacccactgatgttccacaatctggaagaaatcatgtacaggaataatatgctatgcacagggactatgctccttggctcaccccttctcccttataaacaatgagcagttcttgatgaacctctttaaatttaaatctcctgactcacattttaccaattgtacatgccacattctcagcttacgaactaccatgttttgttattcttaatatcaactgtttggtaagagtacagttgtttttatacactctaagaaatgtgtttataatctactgtaatttccactaaatggaacccaaatattaatgttatggtaccatatactgatgtaaaaatcatgctggcatccatgaacacaccggtaaataaaacatagtccaagtggaagaattcattaataaggaacttttaattatgtcacaaatgaatagttggtttccaatgcacaaatatcatgtaaactaatctaaagatggtttgcttaataaatatttgaatgtgacc

SEQ ID NO: 2 - DNA, 21959 bp, Homo sapiens
  source 1..21959: mol_type = other DNA; note = USH2A exon 30-31 and flanking genomic sequence
ggttgagtctgatttactgcggccattaaaagtgaagaataggagcaatagtcttctcagaactgccattttccctattttctcttttattccttcacagctccacaaagtgtgccaactccctcaagagtccgcagcttaaatggatacagcattgaggtgacctgggatgaacctgttgtcagaggtgtaattgagaagtacattctgaaagcctatagtgaggacagcacccgtccaccccgcatgccctctgccagtgctgaatttgtcaatacaagcaacctcacaggtaaatgcaatcctttaacagagtagaccctattaacttcctttttgtttgcattttaaataaaaatcttctgcaaatgttttttagaaaaatgtattaaatatacatgtattttacctgattaaaaacaacacccatctaaagtagtggaagcctgcatctacctaggataaaaaggataattctacaatgcgcatgggctctcatggataattttattctaaggtagatattctctccatcccccaaagattacatcataggtggctatagccctttaacaccttatagacatcttttggaaatcctatgtataaatacttatttcacaaagcaaaaatttactctttgggactagccccagttcataccactattatttattgtaaaattgctgattaaacctaattatctcaaggtggaggagtcttagagccccagttagttggactggcaaatcagtgaatcgatttctcacagtgtggtgtgccatgaagaatgattataatgaaatatactcatacacaccactaacacatctcacactcaaattcatgcgtgtgtattaagagcatttttcagcttcatgaaatattaaagcacatttaaagggagagtttaatttaagcctttgataaaagggaagtaaatgtgtcaaatttgacagaaaaaaaacattttcctctatcaaaaaatcctataacgtgaaccatcagaatggacgttagaaaagccttaaatattttcccaacaaacctgttggtcaattccctcaagactttacttccttctttagacactttggaatgcacagcccaaatatactaccaacttttagcaaaagaaaaacaaattcacacccttcacttctttcctattttaccctccttatcaaagcccagcctgagtaagcccacagcttgccttttcacaggttgcatatggcagctacatgggctggaaaataccaagtagtttattgctaaaaatgctcaaccccactttcagatgagcactcagtaatgacaccaaccctactgtatttccagaatagctccttcccccattctcctcattaaatattttatatttttccaaactatacacgttacctccctttctcatcccactcagctgacagcgttctattttagattatattagacaccatagaaaaaacaatttattttataggatttctattactttcttactaccaaatgtacatattaattgcatttttctgcctgatggagttgttattaggggttggatgaatgaatgcatgctaaaacacataaaaccattttgatatacaggaggtgtgtgctatgctataattttattttcattattatttttaattttcacgctttttttcctttctgttttacaaagcttctcttatcctatcaaaaatagaaatcttcacaagtcctctggaccctgactctttctgtttcttcagagatattactgatagcttatcgtcctctcacttatatttttaacgcctctgtctgctgcagtagagtatggcccaaggaccagcattactagcttcacttgggaacttattactaatgcacattctcctgccctgcccaccccacacccgccaaatcagacactctgcagtgtggctcagcagtccttgttttaacaagcccccagatacatctgatgtatgccagcatttgagaaccactgactgggtggattcttcccagggtcattcaaactcttttatctcccattgttaaaaaccaacacactaacccaaaccaatcacaaaaatcttaattctgtccaaactcccagctattgctccctctctcctcctctcggccttcgtctagcatgaagtatctaagctcattttgtcctcacttaactggcttctgctcattactttcgtgacgagcaccaaaaactgccatgtttacataggcaaaaaacacttgacactctatgtcttcaccactcttcagcattctccacagtaactctttcatcatttctagaaatatttcttcacttctgtgacttttctgcttacctcctggttctccaggggccctgttctcagtgtcctttgctcacttcttctaaagtgtgacaaaatattgaagagtctcaggatttagaactgggccgtcttctctttctctttcatttttttctggcttgctccagaagccttattgactctcataacatcaaataccagatagatgctgctattgactcctaattgtacatcccacctagacatccaaatgcctgcatccaataggcgtttggacacaatgacatttccaactggatgtctctcaccttctacccataccaaacctcaactcttgcttctcctgcattctcatagatacctccagccacccagtcaatacaatttgagagttactctggacttttcacctccttcacacctcatatccacagttgtcattctatttttcaaaatatgtgttaaggtcatccatttctcctctaatctactggccagcccaaactactaccatctttttcctggacaactgcaatacttaccttcatctttttcatagccttttttttttttttctctccctggccgtgagtgtattctacagagcatccaacatcatgtccctctcctcaaaaactttctttcttttttttttaattatactttaagttctgggatacatgtgcagaatgtgcaggcttgttacataggtatacatgtgccagggtggcttgctgcccccatcaacccggcatctacattaggtatttctcctaatgctatctctcccctacacacaccctccaccgctcgacaggccccgatatgtgatgttcccctccctatgtccatgtgttctcattgttcaattcccacttatgagtgagaactcgcagtgtttggttttctgttcctgtgttagtttgctgagaatgatggcttctagcttcatccatgttcctgcacttcctctctcacaatcacactttgtctgggtctccccctacttccagggtttccaacaattaccgttgtaattaatataatttaaagaaatttgtatgtaaatccttaggagaattcctgacaatgatgatataataaatccctagcagtggaataactgcatcgaaggcttttaagacattgtatagtcttgaactttgaagtcagacattgatataaatctctgctatataccttccctgtggataagttccacatccttctggatcctaaagtcctaacctatgaaatgggagagtgatatttacctcagaagaatattgaaaatattaagtgatatgatattctagctctaaccctttttagctgtgtagcttggacaaatcaataaacctctgtttgctttaaaatccttctaggtaaataagaatgagatacaactacatgcctcccagggcagctgtggggattaaacgaattcatatgtatgtaaagcacatagcacagtgcttgacatgtggcatgcactgtatcaaagttacctacaggatatctgtaaagtgtgtaacattatgcttaatgcttggtaatttctcaagaaatggatagcaattattattattattattactattattatttaatgaagtctcactctgtcgcccaggctgtagtgcagtggcgcaatctctgctcactgcaagctccgcctcccaggtttacgccattctcttgcctcagcctccccagtagctgggactacagacctccacgcccgggtaattttttttgtatttttagtggagacagggtttcaccatgttagccaggatggtctcgatttcctgacctcgtgattcacccaccttggcctcccaaagtgctgggattacaggcgtgagccacagtgcccggccaggatagcaatttttacactgcccaaaaagctgtacaaattatgcttccaccagcaagcagaatgcaagattgtgcatttcattttatctagccaacaccaaggtttacacttgaaaaaaattgcaaatttaaaaggcaaaatatatcagaatattgttttagtttgtatttatgtgattactagagagattagttttttaatatttattgaccatttctacttcttttatgatgtgcctaggtaggtccattgttttttattttttattttattttatttttttattttttgagacagggtctcactctgtcacccaggttggagtgcagtggtgcaatctcagctcactgcaaactctgcctcctgagttcaagagattttcctgccttggcctcccaagtagctgggatttcaggtgtgcatcaccacgccagggtaacttttgtatttttagtagagatggagtttcaccatgttggccaggctggtctcgaactcctgacctcaggtgatccaccagccttggcctcccaaagttctgggattacaggcatgagccactgcacccagctgcattgctaatttttctattgaatgattcacattttctcattaaagtttttctctgcatatgaagaataatatacatgtttatctcatctaatgcaactcccccagttttgtcattttttaaaaaattttgatttgcatttttgtgtagagatttaaaaaatattttatgtagttaatataacacccttaaaatgttcaatattctatgtgtgattttttaaaaatatatattccccatttagggttgattattgtttatgttagatataccatattgataacatataatgcatattcctcaaaatagtaattctaaggttaggataagaacaaatcagaaactggatgcagggaggcttttcaaattaaatcagcctctcccaagattctgaaggataccttcttgaaggcgagatcccacagattgtaaaccaatgtagggcagtactggatgttactcaaaaggcatgtcatacatggtagtgatgtatagggagaagaaaatcagaaaactgttgagcaattgttatttatttttatatatcaaatttgtcacaaactaagggaagagttaactatgttaactatgcatgcagttttgtcaatttctctgagatttttttgtttgaattttttgagtttttattacttttacacttattatttatgttttaaccttcaaagtctcattgctttaggtacagtcatgcattgctaaaggatggatatgttctgagaaatgtgtcattaggagatttcatcaccttgcaatgtgcttacataaacctagatgacatagcctactccacacctaggctagatggtgtagcctattgttcctgggctgcaaacctgcacagcatgttactctattgaatagtgtagggaactataactcaatggtaagtatttgtgtatctaaacagatcaaaacacagaaaaggtatagtaaaaacactgcatggtaatcttatgggaccaccatcctatatgttgtctgttgttgaccaaaacattatgtagcacatgaccacatggcagcaacttggctaacatcctttaattcaacattgttttcttataagtttgatgagaaaattaaaaaaaaaaaaacaatccctagcaagggccactctctgcatggaattttcacattttccccatgtttttgtgggttttctctgggtactccagtttcctctcacatcccaaaggttttccccttacatgaattgagttgtctacgtgaccccagagtgagtgagtgcaggtgtgtatgagtatgccctgtgatggtatggtggcctgtccagggctgattcctaccttgagccctgagctgccaggatgggctccagccacccacaaccctaaagtggaataagcagattggaaaataaatgaatgagtaaatagaaatcattataaaataaaaattcataaagtctatgataatcatacagatgcacagcaataaacaattcagtatgacagggctcagcaagctgcccagtctgtgattgctggggtttgaacttcatgctggtaggcggtgctccttacaatgttcacttggaaagcatttattccttgatttatataccacaccactgtcactcactgattcaccaaaacttgagtaaatcattatttcgttttgattaatcttttgtaaatgcatgtatagcacacattcatttcaatgtttaatattagtagtctatagaaatttggtgatgttttgtgaccagaaatatgccataggatcttaattcttttttacatcaattagcctgtgggaaaattgggtttgttgtatatcatttcacttaaaagtgatagtttacaaaaaattccaatgacattaagtgaagacttctatatatctctgcagttttagttttatctttcacttgagattctctgtatttaagtacgggagtcactcattcatacttgtttttataattgatataattggtcttctctctgccatcatgttttatgctttccagttttattatttcttgttttttagtgattttttcactacatttcttgccaatgtgtactatgaattctttgattttttttctttcaaggagtttgcttctctcaatgctaaattgagtcatcaaggacataggtagaaggtaatcttaaagactaagaagaactccagtattgccaggtggacttttcattgtgaagactcaggataatgaggagggaatgtgaattgagagtcaccaaagccagcttggataattatcaaagtcagagaatttcccagtaaacaaaaggaatactaggaagtgagatggaaggagctgataaagcagagagccagaaagctggatttggtggagacgttaggggtgcagagattgttttgaggcagctgttttgccagttggttgagaaaccaaggtaccaaaagagagaaaaatcggtgaagcctatataaacagttttgctattgagcagttttgctactgatcttgaaaataacccttatttagcatttctgaggtgacttttgttgagattttaatatttaagttaattttggttgttagagtcatatttaaataaaataattctgacactgaatgtacaaggcaatttcgctttattagttagcgtagggttctttaccaattaagtttaaaaaatgctaatcagaaaatgtgctgttttatttcattaattttttgttgtataataagctcttttattcttcagatttgggtctttcttcagcttggaaaatttgccattgtgtttatgatcattacttctggtgagaaatagcaattttcaatattgtatatttcttcctaggttgtcttcctcattttagtagttcagaacacggcttgtagagtcaaatcaatctaaggtcaaattccgcctatgccactttttagctgtgtgatctcagacaaatttaaaaacatatccttacattggagtttcctcattcataaattggggatgaaaaccttatttatattatggaactgctataaagattaaaatgagttatgtaaaatattttgctcagaaacaggcacatagtgagtgttcaatgaattcatagttacctttataatctctgaattacagtttctgatttctgggttattgtcccataattgtttttatttccattttctgatttttgcactgttgattctgctctttgaaacttctaagatgatttttaattcttctagttcagtctttgatatgatctgcctttttcctcatctagcttgctttgatttctgcctgcctcttgaaattctcaatttttgtcttcatctcttgtttactgcttaccttctgtctcttacttagtggattccaagttattttagatctaattaatggcatgcaactcgtgatttttaaattttacaagtttcttgaattaaatcctccccagaatatgacaatcttccataatttgagggctatatccttatccttctttcaagttacaatttttccatcagctaaatgtcctcccccaaactcaactccatagtttagttggctcatctctaatataaccttctgactgggtgtttgcatgggaaaattaaactgttttcaaatcatcttactgggcatccagttgctgttaataaaagcctttgctaagatgatgacagggttagtggggtaagtttgcattagccgcgcagccaccctacagtttcagcttctttcttcccagtgtttggtagagtaggagtgctgagagcttgctggcattttgcttccagtttaagtttgggtttgcctaggactttccttctaacagtccattgtctctgcctggtctcgttttaggtatttataaaactttggtcgtttcactgggattcttacaaggtggtagttcaaaactatagctgtatactgagtcaactggggagctttaaaaaatatactgatggctgtgtgccccacatgcaaaatgtctgattaaattggcctggaatgtggcctggacatttgtacttttaaattatctcaggtaattctgctgtacagccagcacagggaaactctatttaaaggaggagtttgtcaccagtgatcacatttaaattttatccagatattcttataactttcatttccccactgaaactcaaaaatgttaggaaataaaaaactaaatgtatataaaaaataataagctattaaaagtaaatagaaaatactagcaaaggaatatcataagatgacaaaaattaagtgtaatagttattgggaagtgggattttatgttcagacttacaaaaagcagaaggtaaaagcaaagaaaattattaaaaatgaatatcaactaagataactgaagaaaacagaatagtgaagcagaatatttaccattcatgaatttgtctatcagaggattaaatgagataaatcccagttgcaatggagagtccaagggttaacaggcccgctcaggagcaaatgggcccctttgggccacagggtctagattctgtgccctcccaaggccaaggttcagagcaaggagttctttaaggttcattccctcagccagagcctcagggtagaaaacccttcagttatcactcctgtgtatctttagatttgttgaaagggctccaattaactctgggtagcttttgctgatttttcctgcagccctgttaacatgcaaagctgcagcccagagagacaggactggcgtttcccctcaaactgaggactgctcagaaactgacttcataatttgatttgaaattatttcaagaatgaatggattcaagacttcgcacatatacgaattattttttccgtaaggtgtttaaacatgtaaacttaattatcagcataattactacagcacctggcatcaagtgttacagatataattggtgtatacaaaatattttctcaattttattgttgcattacattgagctaaagtctaggggttatattgcttcttcaggtaaaatgataaataatagtaatatttcttactatttgctatagtttggcaaatgaatcaataatgataagaataatcttccagatgactcacatatatctacatttatgtaaagaaaaagacattttaatttataacacaaataataatatagcttttgccactaaaattgtttcagtctttacatacaatggacttaatttttttacctgaatgaagtgggtttcatactgaaaatctgcctctaatttttgcctcttttacatggctactgtaataattagtgactctcaattctactggtcataaggtgattctcagattacttataaaatgcagatttgggggtcactcacacatgattctgtacatctgggctagtatttagcaatttgcattttacctaatgctccaattgtatttttggaaggtttatgaaccacatattgaaagacactagtgtagaggagtggtcagcttagactggaatactttcacctgctaggcttgcaactatccctgctttattcctgcttctggttctgactgtgttagctttgctgccagaaaaatgccaaggcaagtgaagaaagagaggcagtgtcagtaggacccctgaaccccagtaggactcctgaacttctgaaaattcccagaagaaagaaagtaagaattggggatcttgataacatggattctgattcactaggtctgggaatatggtgttagattctgcatttccaaccagccccctcccactctgtcatgccccatatagaaaggcaaggagctcactatttatatgggaaatggaaaacaacaacaacaacaacaaagaaaaaacagtaaaataaaacaaaacccaattctcaattacaagatgccccttaggttcatataaaagtgagagcagtataattcaatgtaggaattatcattgcaatgtcttggtagagccttgcctgcatgcatttaagttacaaacattcaactacatattttggaaatgggtaagggatggaggaaaaagtaaaaaagcaaaaattaaacaaaacaaaaacctataaaaatagtgtcataggcaaaggatgctatccagtatggaaaatgtcaacatctgttagctggaaagaatgtttgaataattttagggtttcccagtcattgacaaagaagtgatactcattgtttgggtgtctacaaaaagaatgaagacttcagagccctgaagaatcattgatttctgaagagttagaggcatacacaaaaccaaatgtactatactttatgggccatataaagagttgtcaagggaactttaaatcacgttatttttgccttatgcctgattttggaacttaaactcagctatgcagagtatcatcagtaagattaaattaaattaaaatgctactctatatatgtatgtatatgtgtatgttatgtacgttcatatattatataaatatgctctctctctatatatgtattctctctatatatatgtaaccatacttacctgagaagtctgcagagaaatgactgtaattcaacgccgtgaaatttttttttctattcaactgaaagttcttactccatagttgctaaaactgcctatggtactctctgtgcacccatgctatttcttcaatagacaataagctcctggaggacaagtttcatgtttcatatttattttaagcctcgttcactaccttgctcaaggtaagtgattaatatacttatcttaaaagaatgaatgaaggaatctttcaattagcaaatgtagctttctgctactaaccccatagttaacctaatgttaatatttttttgtgctgagttggactgagtattgaactactagtccttactaaagtctcctcagtcttttatcaacagttctttaattttatagaagaatgcacagagctatcacaacttaaatgtatatttggaacttaatacacatttcccaatagaaaaaaaatatgttggtagggtaagactaataaataactaataaagactaattccaaaacttagacctcagaatagaacccaaccactacatatttgaaatgaaaaataatggaagccaatactgctgcaatgctgataattataaagaacagaaaatattcatttatttaaaaaagtgatctaccacgttccatgctagtgctaggccctatcattgtaacatgatttttataacactaaaatatagcccaagcactctctctgaagtataagattatgtagacaatgaaagttttatagggaaaacctaacagagatgggtttatcatttttaattcattatttcacttgagatactgagaacctaaaataatagcgatgaagtttttctctcactggtaataggtgtccacagtaagtcaatgcagaggcgggatgttcataggcgagacccacacacttcatctttttgctgtgtcatccttatggacaaggcttctacctcatagttcaagatgactgcttgagctcctgccatccagtctgattttcacccaacaggaagaaataatggttaaagaatactcacattcactttaaagacatattttagaagttgttcctccacctctggttatcttgcgtggccagaacttagtcacatggctgtacctagcttcagggaatgttgaaaaatgctgtctttattccaagtagccacttgcccaggtaaaaagtgtttttattttactgaggaaaaggagtataatacataataaggagcaattagtaatctttgccacaataggaaatcgtcagaagtaaataaaaagtaattctttttgttggtgttattaaagataaaagccagtttttatagtagaccataaattaatattccaatatttgtagtttattacgaacttttttttttaatttgagatggaatcttgctctgttgccgaggctggagtgcattggcaccatctcagctcactgcaacctgcgccgcccgggttcaagcaattctcctgtctcagcttcccaagtagctgggactacaggtgcatgccaacacatctgttttttgttttttgttttttttgtttttgtttttgttgttggtatttttagtagagatgggatttcactatattggtcaggctgatctcaaactcctgacctcaggtgatccacctgcttcagcctcccaaagtgctggcattacaggctacaaaatatttctttaaatgtaaatcttgaaagaaactggtctgaaaaaattcacaggacgaaaatatggcctatgacataaatagtaaaaatagaaatgatgtaatgttcctgcttagctaatgtagaaagatttcattaggtaatgcagtgttgatgagttaatagctttgtctaactctcctgaatacataatgtgcctgaactactggtacattgtgaaatcttcagagagagttgttttttaaaaaaaaaagtttttcattttattttatgcaataagaattgacaccaaaggatttgcatttctttttggtaacatgttgagccgtagttaaaaatgatgaaaatatataacttttgttctacagtgataatcaactaggcatgtccacaatgcttataaacattcaatacaaatacttcaaggttatcaatcatagttgataaagaagaagaatgcacagccagacttttctgttttctaccttttatgatcattttatatttgtgttatatttggaacaaattaaaagggttatatgtataataaacaaaggtccaatattgaacccaatctctctctctcacacacacacacacacacacaaatgcacacatagaatttcttataaatcagtcatttttgtaaaggaatattacaggcatacaaacttgctcattttggaggacaagacttctaatttctgtttgtaagcaataggtgtcagtaataaatttgaacctcttaacacattttaaggtgcattttaaataagatattttatagtaaaaagtgtgctattattgtttttaattaccatttttcaacacttttttcttgtttgtggaactggagcttaggtcaaatgggaggagtaatgatcttggggtcagaatacaggttctaatattggctctactgctttttagctgtctggacttgagcaccatacagtacactcactccaaaagcagcctcctctgtacaatggaataacaatatcagaggcttgtagcaggggaccttggacactgatcataagggatgactttcatttctctttcttttcttttcctcttgtctccttgcctgtctctctgcttagtcaggtccagtgttttcttgaagagtttcagtaatttcagtgtgagacctttatgtaaggtaaagagttaacacaagcacgtggcttcaaacttattggcaaattagaataaaaatggcaaagactctgtagttcttaccacaaaggcattgattaaaaatttgaggttagaggtaaacctgctgagagaatcttaactggataatactttgaggtcaattaaaatcactgtttaaaccgtcctctaagactgggattagaccacatattttataaagaaataaagaataatgtttttcctgtttgtaagaatcaacatctgcatagtctttgataggtatatgatattctatgctctctaccaaaagttttaaacaaggtcaaaaaacccatttgaaggaaattaaatgtaagaaaaattagttttgaagtttccaagggattaccttaggtttgggttaagtgtatttattgttccaccttttgggtaaaatgcaaattgactttccctttgtaaatattagaagtccttatttttattgaaaatattatccaaaaacaacaataacaaatcccaccctcctgggctaagaaccagaggagaagcatcctggatatgtttccagatctctattagatagttaagttttcatccatatttaacaaatgtcattattcagtttcatgggatcactgtgtcaaaatgtctgtgttagaactttattttcagaggttcctttaagtggtcaggaagcatggcatattggattgattactctctttaatccatccactgggttggtttgggatgtatacttaaaaattagattttatcagcactgcagcgggatcctcagccagaagtctcttcttctgccctccttcccctagccagttttcttttaaaaagtgggctcttccattatgtctccaggtagcagtagcagctctgcctgtgtggcatcccttaccagatggccctcttaataaatgtcttgctcttgcccaccctcactttcttgatccaaatgtgaaatgccagcaaataaataagagcattgtactctgatgagttctcttgagatgggggaaaaccctggggagaggaagctagaaacagcttttctgtttgctgtgactgctcctaattactggccagtagtagaagatatcatttagatgcagtagaatataaagataaagaaaaaaaaatgagagataaattctccatgttatcccaaatgcctttgctaacgtggaaatactcttggattgttggagtgcatttgaaatattgtgcatgatccttacaaggggacccctgactttggactcagggtagacagttgctgcatgcagatttcaccgccagactaaaagtgcaacggaaatgagtgggtgatgagagcagagcagccagttctttaattgaattaaaagctgggtgacatcaatgcagacacctgtccaattacagacaggccaaggtgtttaccattgctgtacaagcgattcgaagatgacagaaatctttccgcccacagattaacataatgaaggagaacagattacagtggatgccggccaaacaccttggttggcagctgggggtggggtgggggagggaggaggagtctgctgaagtatgtaagtagaaacggagtccttttttcttctctgaaatatgctcggctttaaaaaggatccattttgctttgtgtcttaggctcggtttccaggcagagcatttatacttgtctgcatttagtcagaggagttaatcataaaatttcaacgtgaaagcagactcctctgttgttttgctgcttctcagcatacggtgtcccattagaggtgcaaaagcttgcagagctggtgtcagctccacaatgattttgtcttaggtcgtcaggctgcctccaattattaatatttttctttggctcctttgaaacttgaggttacagcaaaggaaagagagtgttggagataataatgtatcagtcaaaagaaacaatgtctgtcactttgcttgttccctggaaggggcgtggtgggagtcaggctctcctatagtgagagaaatagccgagtggagctaacagtctgcaaaatcttaattttcagtcacccgtcaagtgctaacttttggtaaaccatactaatagctgctgggatagaggataaggaaagcagtaaaaggctatgccctctgtgttcaaggaattcccaaatcactgtgaaggacttctaagttgcaagttctctaggccaatgctcttcccctctgttaagtggaaaccctgagtgcacagagtttggagccatatgcagtaggcctcttaacctatctacggtgatgagtttccttcccttaaatcaagtccctgccccctgatctttcagcttgggctttctgcacccactgtggcccacaggacttcaattcaaagggaatctacttacttgacttcaaactcccttggtgtggcatgtcaggatttctcaatgttaggcattaatgcaaaatgcattatcgcttagcagtgagagttatggtcctgctggtgccaatgattttaatccggatacccacgctcctgtgtttcatgggatactaacacttttaagacatcaataatgcttactttatgcttattgaatgtttcttcagcttgccctcttccattacctagagggactagcaggtttcctgacatgattgggaccattttctgatttcacagagtttgtggctgaaaggcagtttgcgaggtcatctggcctgccttgtaatagggacactctcaaaaaaaaaaaaaaaaaaaagacttctctgggatgtgtcccaaacaaagagattcacaaccaaaccaattttaaagttctccctttcaggatatacttcttcagtataaaaaccccaagtgtcacaagtatcataaaaggcaactaccgcattttctatttttgggctttctgtctaggattcctttagatatgtcaattctctatttcccagtattctttttaatataataccaaaatatatatttaaattaaatttaggcttcctattatcttgaactggtaagtctgaatcttataaatgtcattgtctacttggcccgtatgcaaacattcttctttatgtatcaatctgttactgtaagaattcttctagttccaatattttcttatgttagaaaccttgtaaaaatcagttgtattctatagcaccttttccagacgcatatagcggaaacattgataaatgctttttgatgatgatatatcttcagagtaacactgtattttccagagagtacctaatctaagtagaaccctgacacttaaagcaaagccattaggataaccactcaatgatctcaaaggatatatccacaatctacatagtcttggagagaatgtgttactctctttctttggccatggcacaacttttcaacttgaatccatcctggtgaacactacttactgagaatcaaaggagataaaccacgtgtctccaacaataaaatgaccttgtcttgattccaagtgaatgaagaccacatatttgaccagccccttgcccttgcataacccttaatttttaacctgacaggaggagaaagcacagtgaaccattatagtgttcttcttcctgaagtaggtaattctaactgcctttaaggaaaattatcagttggtttgacaaactttgtctctgacacacagcatgatgaacaagattccctactggaaatagaaaagaaatggcactccagccttagaaaatgcagcacattttttgaaagtgtgatttacaagccatctaaaaccttccatctttgatccaaagttggcaagaaccaaaacatcagctttcttctttttctttctttttttttttttttcctttgttttctatttttcagctctcatttctcagggcttattattgtttcaccgggcttgaaatgggaaatgtgagcactttgataaatggcttgaaagatgatctagtttctctccagcatctttctttaagagtctcagggtttttctatgaaatacaatacaatttggtaaagatctctaccaaatcaaagctgaagaagcaagtttgctgagatgagcagtgcttgcttttaaggtccttaaaataaggagtggctaaaattaataaaagactctcactatacacatgttatacacaacgtaactcctttagtgaagacaagaaacattaaataaaacactaaagatcacttagtgagttgtgaactcaggatctggtttgatacaatccctctgaaagtctatagaatacccttccttataacttgatgtaacaattaaaatttcaacatttcactctagttatgatttggaaagaaatgtcttagtataaggaattttataaagccaggctgtaaaattgtacaatcatagagctgcttttatatttctcaatgataatacttcctgaatgtacaacacatcttcatgctaatgattgcagataaccaacctgtatatcagcattgtttctttttgggcatggtgttcctatgcctcagctgaagcatgctcatctatgaagggtgctgcttttcacatatgccccataggttaagtgatgataaagggaaactagcctcatattccaacatgcttttccttattgacattaggattaaaagtcttattctctgggggctgattcatttcttgttagcatggcgttatactaattcagccatgcaagtcatcttatttagaatcttacggtagtttccaacttggcaataggaaagacatggcaaatgccaaagatttgctaaagatagaatggctaaaacacattttatgatgataactttagttttgagcctggaatttgggtatcgtggtggaggcattacaaaatggaaaaatgaagcttacataattatttagaatgttgattcttggttggggcacgttgagtatgaaataccagtgggacatccaggtgtggttacatggcctgcagatagaaacccagaaccagggcttgggagagatgtgaagtctgtagatacaaatgtgatcactgaaagataaggcttaataagctagcaaaggcgagtgtttagaaaaagaaagaagcttgacaacaacccaatcttgagaaacaaaagctatttaagagactgtgagaggaacatgagtcagtaaaggaaacaaaggagttctcggtagtttaggagaacaactaaaaagttcaatgtcacagaaggaagttgagggaggataaggactgaggaagggctatttgatttggtatttaagggatcactgctgatctttaaaagatacaaagcgtcggccggccgggcacagtggctcacgcctgtaatcccagcactttgggaggccgaggcgggtggatcacgaggtcaggagatcgagaccatcctggctaacacggtgaaaccccatctctactaaaaatacaaaaaaattagccgggcgtggtggcgggcgcctgtagtcccagctactgtggaggctgaggcaggagaatggctccaacccgggaggcagagcttgcagtgagccgagatcgcaccacagcactccagcctgggcaactgagcgagactctgtctcaaaaaaaaaaaaaaaaaagaaagaaagaaagaaagaaagaaagaaagaaagaaagaaagaaaaagatacaaattgtctagtagcatgtagaggcagaaactgagttgcaatggtagcctaaattggaatggcatagctctgcactagagctcttgactggcaatactccatgtaagtattctaaagtcctgaacttgttcagtcttaatactaaccctttgaggtaagtactatattatccccatctcacatgtgaggcctgcaaggcctttccttcaagaccgagattattattatctgtttacagactaggaaactaaggcacagaagtctgaacaacttgcccatgtacatatggccaatcggcagcagatttggcatttggagccagcaatctggcttgagcatgggtgcccatttccccactactccattatgaagatgtgcatgtgataatgttagcttgcttttaagccatttggtggaaggagaaataacttcttaaaagaaagtaaactcagaacgtaggtcatgatctgggagatttaacaggaaatgacaatcgcaggggcaggaatgagagaaagcaggaggttctgacacgagagggttttgaaattagagagagctgaatttggcatgagatggtcacacatgtgtgtatattagttcgttggcttgctgtcttctttggccatgagctaagatgacggtgccaagtggatgaatattttcatgtagaagcatggcagacaggattcagtagcccacggagatgcctgggtcgttgctggaatgaagacttagagacagccctaggaactaagggcaagtgggaggtgtcaaagcaaagaactggtctttgctccatcctggcttgttgatcttttaattctttaaattttctactggggagggaaattatggaaacatgtatattaaaatttgtgtttgaatgatgaaagctgtcatcaaaattggcaccttaaagcaataatgtattctctgagcgattgaaggtttcatcaataaagagacaccacgagtggggccatctttttataaaaatagtcataatctatgtggttaggattaaagattgctctgaaaaacgtctttgcggaaaaacagtggtgagcaaaagcacaagttatattttggattttttttaattcacaggattaactaaataaggagtctctgccttgcttatgaacactagtaaacaaaatgtgttttcatttctacacatacttttaattgctgaacaaatctcatatatctaccagcaagccatgttaattcaatacttccacgtgtaacacttccgtttaagacaggtgtcttaattaaataaactaataattttgcaagtagaagtacaaaagcataattatctaatttgctaattgttcaactatgttaatttgcatacttgttagctacaacataaacaaatggtttgtatatgtatcgcctactgttaaaataatgaagccactcttgggagtagcatttttaaagtgtgttaataggtgccctataaaaaggactccttagttaaatacggttgaaaaatgctaggttaaagaaaattaaatagttttgtttctgcaggaggtctaggatcctggaatgagataatatatatcttagctattggaaacattgtgctctgcctcacgaactatatgtggaaccccctccccattttaatgggagaaacatcagatgctgtttgagagctgttttaacaataagttggtctcacaattttttctcatgagtccttccattcaacaatcagcagaaagggaggaaaatgactgaaagaggaatatgtttttgatttctgtctctggtctctttgtttttgtctctctctcttatagacacacacacagatatacacacaatgctctttattgatgcttatggtaaacacgcaaccctcttttgtccctttttattataggcatattgacaggcttgctacccttcaaaaactatgcagtaaccctaactgcttgcactttggctggctgtactgagagctcacatgcattgaacatctctactccacaagaaggtaaagtaatttcaaaggtcttgacttccacatttcagtcatgaataataaaataggagaagagctaaatgctacaaggccatttgctggcaaaccccaa

SEQ ID NO: 3 - DNA, 192 bp, Homo sapiens
  source 1..192: mol_type = other DNA; note = USH2A exon 30 sequence
ctccacaaagtgtgccaactccctcaagagtccgcagcttaaatggatacagcattgaggtgacctgggatgaacctgttgtcagaggtgtaattgagaagtacattctgaaagcctatagtgaggacagcacccgtccaccccgcatgccctctgccagtgctgaatttgtcaatacaagcaacctcacag

SEQ ID NO: 4 - DNA, 114 bp, Homo sapiens
  source 1..114: mol_type = other DNA; note = USH2A exon 31 sequence
gcatattgacaggcttgctacccttcaaaaactatgcagtaaccctaactgcttgcactttggctggctgtactgagagctcacatgcattgaacatctctactccacaagaag

SEQ ID NO: 5 - DNA, 41 bp, synthetic construct
  source 1..41: mol_type = other DNA; note = ASO_30_1 target site and flanking sequences (+10 nt)
ctcttttattccttcacagctccacaaagtgtgccaactcc

SEQ ID NO: 6 - DNA, 41 bp, synthetic construct
  source 1..41: mol_type = other DNA; note = ASO_30_2 target site and flanking sequences (+10 nt)
ctcaagagtccgcagcttaaatggatacagcattgaggtga

SEQ ID NO: 7 - DNA, 42 bp, synthetic construct
  source 1..42: mol_type = other DNA; note = ASO_31_1 target site and flanking sequences (+10 nt)
ttttattataggcatattgacaggcttgctacccttcaaaaa

SEQ ID NO: 8 - DNA, 42 bp, synthetic construct
  source 1..42: mol_type = other DNA; note = ASO_31_2 target site and flanking sequences (+10 nt)
acatgcattgaacatctctactccacaagaaggtaaagtaat

SEQ ID NO: 9 - DNA, 31 bp, synthetic construct
  source 1..31: mol_type = other DNA; note = ASO_30_1 target site and flanking sequences (+5 nt)
ttattccttcacagctccacaaagtgtgcca

SEQ ID NO: 10 - DNA, 31 bp, synthetic construct
  source 1..31: mol_type = other DNA; note = ASO_30_2 target site and flanking sequences (+5 nt)
gagtccgcagcttaaatggatacagcattga

SEQ ID NO: 11 - DNA, 32 bp, synthetic construct
  source 1..32: mol_type = other DNA; note = ASO_31_1 target site and flanking sequences (+5 nt)
ttataggcatattgacaggcttgctacccttc

SEQ ID NO: 12 - DNA, 32 bp, synthetic construct
  source 1..32: mol_type = other DNA; note = ASO_31_2 target site and flanking sequences (+5 nt)
cattgaacatctctactccacaagaaggtaaa

SEQ ID NO: 13 - RNA, 21 nt, synthetic construct
  source 1..21: mol_type = other RNA; note = ASO_30_1
cactttgtggagctgtgaagg

SEQ ID NO: 14 - RNA, 21 nt, synthetic construct
  source 1..21: mol_type = other RNA; note = ASO_30_2
gctgtatccatttaagctgcg

SEQ ID NO: 15 - RNA, 22 nt, synthetic construct
  source 1..22: mol_type = other RNA; note = ASO_31_1
gtagcaagcctgtcaatatgcc

SEQ ID NO: 16 - RNA, 22 nt, synthetic construct
  source 1..22: mol_type = other RNA; note = ASO_31_2
cttcttgtggagtagagatgtt

SEQ ID NO: 17 - DNA, 17 bp, synthetic construct
  source 1..17: mol_type = other DNA; note = T7 promoter sequence
taatacgactcactata

SEQ ID NO: 18 - DNA, 23 bp, synthetic construct
  source 1..23: mol_type = other DNA; note = Region complementary to constant oligo
gttttagagctagaaatagcaag

SEQ ID NO: 19 - DNA, 80 bp, synthetic construct
  source 1..80: mol_type = other DNA; note = constant oligo
aaaagcaccgactcggtgccactttttcaagttgataacggactagccttattttaacttgctatttctagctctaaaac

SEQ ID NO: 20 - DNA, 68 bp, synthetic construct
  source 1..68: mol_type = other DNA; note = target-specific oligo 5' ush2a dexo30-31
ccgctagctaatacgactcactatagggtgagaatccaattgggagttttagagctagaaatagcaag

SEQ ID NO: 21 - DNA, 68 bp, synthetic construct
  source 1..68: mol_type = other DNA; note = target-specific oligo 3' ush2a dexo30-31
ccgctagctaatacgactcactatagggctaaaaagaattgattggttttagagctagaaatagcaag

SEQ ID NO: 22 - DNA, 20 bp, synthetic construct
  source 1..20: mol_type = other DNA; note = ush2a  wild-type forward primer
ctccacaagagggtaaagtc

SEQ ID NO: 23 - DNA, 20 bp, synthetic construct
  source 1..20: mol_type = other DNA; note = ush2a  wild-type reverse primer
ttggaccggctttatttctg

SEQ ID NO: 24 - DNA, 20 bp, synthetic construct
  source 1..20: mol_type = other DNA; note = ush2a dexon30-31 forward primer
ttcacttcatgccattcagc

SEQ ID NO: 25 - DNA, 20 bp, synthetic construct
  source 1..20: mol_type = other DNA; note = ush2a dexon30-31 reverse primer
ttggaccggctttatttctg

SEQ ID NO: 26 - DNA, 20 bp, synthetic construct
  source 1..20: mol_type = other DNA; note = ush2a exon 28-33 forward primer
ccctgctctgaacaaacaca

SEQ ID NO: 27 - DNA, 20 bp, synthetic construct
  source 1..20: mol_type = other DNA; note = ush2a exon 28-33 reverse primer
tgttggtacatcctgcctca

SEQ ID NO: 28 - DNA, 51 bp, synthetic construct
  source 1..51: mol_type = other DNA; note = USH2A intron 29-30 forward primer
ggggacaagtttgtacaaaaaagcaggcttctgcttcaaagggggtacatc

SEQ ID NO: 29 - DNA, 50 bp, synthetic construct
  source 1..50: mol_type = other DNA; note = USH2A intron 29-30 reverse primer
ggggaccactttgtacaagaaagctgggtccattcttcatggcacaccac

SEQ ID NO: 30 - DNA, 51 bp, synthetic construct
  source 1..51: mol_type = other DNA; note = USH2A intron 30-31 forward primer
ggggacaagtttgtacaaaaaagcaggcttcactggggagggaaattatgg

SEQ ID NO: 31 - DNA, 47 bp, synthetic construct
  source 1..47: mol_type = other DNA; note = USH2A intron 30-31 reverse primer
ggggaccactttgtacaagaaagctgggtccctgtgctgctgtttag

SEQ ID NO: 32 - DNA, 20 bp, synthetic construct
  source 1..20: mol_type = other DNA; note = Rho exon 3-5 forward primer
cggaggtcaacaacgagtct

SEQ ID NO: 33 - DNA, 20 bp, synthetic construct
  source 1..20: mol_type = other DNA; note = Rho exon 3-5 reverse primer
aggtgtaggggatgggagac

SEQ ID NO: 34 - DNA, 20 bp, synthetic construct
  source 1..20: mol_type = other DNA; note = ush2a exon 28-33 forward primer
ccagggaaaagagcagagtg

SEQ ID NO: 35 - DNA, 22 bp, synthetic construct
  source 1..22: mol_type = other DNA; note = ush2a exon 28-33 reverse primer
gcatatgatcctggaaaagttc

SEQ ID NO: 36 - DNA, 20 bp, synthetic construct
  source 1..20: mol_type = other DNA; note = GAPDH forward primer
accacagtccatgccatcac

SEQ ID NO: 37 - DNA, 20 bp, synthetic construct
  source 1..20: mol_type = other DNA; note = GAPDH reverse primer
tccaccaccctgttgctgta

SEQ ID NO: 38 - RNA, 21 nt, synthetic construct
  source 1..21: mol_type = other RNA; note = mmASO_30_1
cactttgtataactgttaagg

SEQ ID NO: 39 - RNA, 21 nt, synthetic construct
  source 1..21: mol_type = other RNA; note = mmASO_30_2
gctatatccatttaaaatacg

SEQ ID NO: 40 - RNA, 22 nt, synthetic construct
  source 1..22: mol_type = other RNA; note = mmASO_31_2
cttattgtgtattaaagatgtt

1. A set of antisense oligonucleotides for skipping of exon 30 and 31 that bind to and/or are complementary to a polynucleotide with the nucleotide sequence as shown in SEQ ID NO: 1.

2. The set of antisense oligonucleotides for skipping of exon 30 and 31 according to claim 1, wherein each antisense oligonucleotide has a length of from about 8 to about 40 nucleotides.

3. The set of antisense oligonucleotides for skipping of exon 30 and 31 according to claim 1, wherein the set comprises at least two antisense oligonucleotides that comprise or consist of SEQ ID NO: 13, 14, 15 or 16.

4. The set of antisense oligonucleotides for skipping of exon 30 and 31 according claim 1, wherein each antisense oligonucleotide comprises an 2′-O alkyl phosphorothioate, such as 2′-O-methyl modified ribose (RNA), 2′-O-ethyl modified ribose, 2′-O-methoxyethyl modified ribose, 2′-O-propyl modified ribose, and/or substituted derivatives of these modifications such as halogenated derivatives.

5. The set of antisense oligonucleotides for skipping of exon 30 and 31 as defined in claim 6, wherein each antisense oligonucleotide comprises a 2′-O-methoxyethyl modified ribose and a phosphorothioate backbone.

6. (canceled)

7. A pharmaceutical composition comprising the set of antisense oligonucleotides for skipping exons 30 and 31 according to claim 1 and a pharmaceutically acceptable excipient.

8. A pharmaceutical composition according to claim 7, wherein the pharmaceutical composition is for intravitreal administration or intratympanic administration.

9. A pharmaceutical composition according to claim 7, wherein the pharmaceutical composition is for intravitreal administration and is dosed in an amount ranged from 0.1 and 15 mg of total antisense oligonucleotides for redirecting splicing per eye or per ear.

10. (canceled)

11. (canceled)

12. (canceled)

13. A method for the treatment of a USH2A related disease or condition requiring modulating splicing of Usher of an individual in need thereof, said method comprising contacting a cell of said individual with the set of antisense oligonucleotides for skipping of exon 30 and 31 according to claim 1.

14. (canceled)

15. (canceled)

16. The set of antisense oligonucleotides for skipping of exon 30 and 31 according to claim 1, wherein the antisense oligonucleotides bind to and/or are complementary to a polynucleotide selected from the group consisting of SEQ ID NO: 2, SEQ ID NO: 3 and SEQ ID NO: 4.

17. The set of antisense oligonucleotides for skipping of exon 30 and 31 according to claim 1, wherein the antisense oligonucleotides bind to and/or are complementary to a polynucleotide selected from the group consisting of SEQ ID NO: 5, SEQ ID NO:6, SEQ ID NO:7, and SEQ ID NO: 8.

18. The set of antisense oligonucleotides for skipping of exon 30 and 31 according to claim 1, wherein the antisense oligonucleotides bind to and/or are complementary to a polynucleotide selected from the group consisting of SEQ ID NO: 9, SEQ ID NO: 10, SEQ ID NO:11 and SEQ ID NO: 12 or a part thereof.

19. The method according to claim 13, wherein the USH2A related disease or condition is USH2A-associated Retinitis pigmentosa (RP).

20. The pharmaceutical composition according to claim 8, wherein the composition is dosed in an amount ranged from 0.05 mg and 30 mg of total antisense oligonucleotides
